(19) United States
(12) Patent Application Publication
(10) Pub. No.: US 2025/0283090 A1
(43) Pub. Date: Sep. 11, 2025

(54) MODULATORS OF DIACYGLYCEROL ACYLTRANSFERASE 2 (DGAT2)

(71) Applicant: Ionis Pharmaceuticals, Inc., Carlsbad, CA (US)

(72) Inventors: Sanjay Bhanot, Carlsbad, CA (US); Susan M. Freier, San Diego, CA (US); Eric E. Swayze, Encinitas, CA (US)

(73) Assignee: Ionis Pharmaceuticals, Inc., Carlsbad, CA (US)

(21) Appl. No.: 19/044,479

(22) Filed: Feb. 3, 2025

Related U.S. Application Data
(62) Division of application No. 17/677,875, filed on Feb. 22, 2022, now Pat. No. 12,215,321.
Application No. 17/677,875 is a continuation of application No. 16/456,432, filed on Jun. 28, 2019, now Pat. No. 11,312,962.
Application No. 16/456,432 is a continuation of application No. 15/741,996, filed on Jan. 4, 2018, now abandoned.
(60) Provisional application No. 62/191,231, filed on Jul. 10, 2015.

(51) Int. Cl. C12N 15/113; A61P 1/16; C07H 21/00

(52) U.S. Cl. CPC C12N 15/1137; A61P 1/16; C07H 21/00; C12Y 203/0102; C12N 2310/11; C12N 2310/315; C12N 2310/3341; C12N 2310/341; C12N 2310/346; C12N 2320/35

(57) ABSTRACT

The present embodiments provide methods, compounds, and compositions useful for inhibiting DGAT2 expression, which may be useful for treating, preventing, or ameliorating a disease associated with DGAT2.

### SEQUENCE LISTING

[0001] The present application is being filed along with a Sequence Listing in electronic format. The Sequence Listing is provided as a file entitled BIOL0178SEQ.xml created Apr. 4, 2024, which is 4,151 KB in size. The information in the electronic format of the sequence listing is incorporated herein by reference in its entirety.

### FIELD

[0002] The present embodiments provide methods, compounds, and compositions for treating, preventing, or ameliorating a disease associated with nonalcoholic fatty liver disease, including non-alcoholic steatohepatitis (NASH) and hepatic steatosis, by administering a diacylglycerol acyltransferase 2 (DGAT2) specific inhibitor to an individual.

### BACKGROUND

[0003] Nonalcoholic fatty liver diseases (NAFLDs) including NASH (nonalcoholic steatohepatitis) are considered to be hepatic manifestations of the metabolic syndrome (Marchesini G, et al. Hepatology 2003; 37:917-923) and are characterized by the accumulation of triglycerides in the liver of patients without a history of excessive alcohol consumption. The majority of patients with NAFLD are obese or morbidly obese and have accompanying insulin resistance (Byrne C D and Targher G. J Hepatol 2015 April; 62 (1S): S47-S64). The incidence of NAFLD/NASH has been rapidly increasing worldwide consistent with the increased prevalence of obesity, and is currently the most common chronic liver disease. Recently, the incidence of NAFLD and NASH was reported to be 46% and 12%, respectively, in a largely middle-aged population (Williams C D, et al. Gastroenterology 2011; 140:124-131).

[0004] NAFLD is classified into simple steatosis, in which only hepatic steatosis is observed, and NASH, in which intralobular inflammation and ballooning degeneration of hepatocytes is observed along with hepatic steatosis. The proportion of patients with NAFLD who have NASH is still not clear but might range from 20-40%. NASH is a progressive disease and may lead to liver cirrhosis and hepatocellular carcinoma (Farrell G C and Larter C Z. Hepatology 2006; 43: S99-S112; Cohen J C, et al. Science 2011; 332:1519-1523). Twenty percent of NASH patients are reported to develop cirrhosis, and 30-40% of patients with NASH cirrhosis experience liver-related death (McCullough A J. J Clin Gastroenterol 2006; 40 Suppl 1: S17-S29). Recently, NASH has become the third most common indication for liver transplantation in the United States (Charlton M R, et al. Gastroenterology 2011; 141:1249-1253).

[0005] Currently, the principal treatment for NAFLD/NASH is lifestyle modification by diet and exercise. However, pharmacological therapy is indispensable because obese patients with NAFLD often have difficulty maintaining improved lifestyles.

[0006] Lipodystrophy syndromes are a group of rare metabolic diseases characterized by selective loss of adipose tissue that leads to ectopic fat deposition in liver and muscle and the development of insulin resistance, diabetes, dyslipidemia and fatty liver disease (Shulman G I. N Engl J Med 2014; 371:1131-1141; Garg A. J Clin Endocrinol Metab 2011; 96:3313-3325; Chan J L and Oral E A. Endocr Pract 2010; 16:310-323; Garg A. N Engl J Med 2004; 350:1220-1234). These syndromes constitute a significant medical unmet need as these patients are refractory to current therapies, mainly used to treat diabetes and elevated TG levels, in an attempt to reduce the risk of serious associated complications (coronary artery disease, diabetic nephropathy, cirrhosis and pancreatitis).

[0007] Partial Lipodystrophy has a higher prevalence (estimated ˜2-3 in one (1) million) than generalized lipodystrophy, but the extent of the prevalence is unknown because these patients are greatly under-diagnosed (Chan J L and Oral E A. Endocr Pract 2010; 16:310-323; Garg A. J Clin Endocrinol Metab 2011; 96:3313-3325). Partial lipodystrophy is further divided into acquired partial lipodystrophy (APL) or Familial partial lipodystrophy (FPL). The diagnosis of PL is mainly clinical and needs to be considered in patients presenting with the triad of insulin resistance (with or without overt diabetes), significant dyslipidemia in the form of hypertriglyceridemia, and fatty liver (Huang-Doran I, et al. J Endocrinol 2010; 207:245-255). Patients often present with diabetes and severe insulin resistance requiring high doses of insulin.

[0008] Current treatment includes lifestyle modification such as reducing caloric intake and increasing energy expenditure via exercise. Conventional therapies used to treat severe insulin resistance (metformin, thiazolidinediones, GLP-1s, insulin), and/or high TGs (dietary fat restriction, fibrates, fish oils) are not very efficacious in these patients (Chan J L and Oral E A. Endocr Pract 2010; 16:310-323; Garg A. J Clin Endocrinol Metab 2011). Partial Lipodystrophy is an ultra-orphan indication for which there is a significant unmet medical need. Diabetes, NASH, and/or hypertriglyceridemia associated with this condition can lead to serious complications (Handelsman Y, et al. Endocr Pract 2013; 19:107-116).

[0009] Diacylglycerol O-acyltransferase (DGAT) catalyzes the final step in triglyceride (TG) synthesis by facilitating the linkage of sn-1,2-diacylglycerol (DAG) with an acyl-CoA. There are two isoforms of DGATs (DGAT1 and DGAT2), and studies indicate that both DGAT1 and DGAT2 play important roles in TG synthesis. DGAT1 is most highly expressed in small intestine and white adipose tissue (WAT), whereas DGAT2 is primarily expressed in liver and WAT (Cases S, et al. Proc Natl Acad Sci USA 1998; 95, 13018-13023; Cases S, et al. J Biol Chem 2001; 276, 38870-38876). Although both DGAT1 and DGAT2 catalyze the same reactions in TG synthesis with DAG or monoacylglycerol (MAG) and acyl-CoA as substrates, they are functionally distinguished not only by their tissue expression, but by their differences in catalytic properties (Cao J, et al. J Lipid Res 2007; 48:583-591; Cheng D, et al. J Biol Chem 2008; 283:29802-29811), subcellular localization (Stone S J, et al. J Biol Chem 2004; 279:11767-11776), and physiological regulation (Meegalla R L, et al. Biochem Biophys Res Commun 2002, 298, 317-323). For example, suppression of DGAT2, but not of DGAT1, by antisense oligonucleotide treatment improved hepatic steatosis and blood lipid levels independent of adiposity in rodent models of obesity and the data indicated that these effects were related to decreased hepatic lipid synthesis (Yu X X, et al. Hepatology 2005; 42:362-371).

[0010] These studies demonstrate that DGAT2 inhibition may improve NAFLD/NASH, as well as the metabolic profile of patients with lipodystrophy syndromes by reducing triglycerides, improving insulin sensitivity, and decreasing hepatic steatosis.

### SUMMARY

[0011] The present embodiments provided herein are directed to potent and/or tolerable compounds and compositions useful for treating, preventing, ameliorating, or slowing progression of NAFLD, such as NASH, as well as lipodystrophy syndromes, such as partial lipodystrophy.

[0012] Several embodiments provided herein are directed to several antisense compounds that are more potent and efficacious than antisense oligonucleotides from an earlier published application, WO 2005/019418. Several embodiments provided herein are directed to compounds and compositions that are potent and tolerable.

### DETAILED DESCRIPTION

[0013] It is to be understood that both the foregoing general description and the following detailed description are exemplary and explanatory only and are not restrictive of the invention, as claimed. Herein, the use of the singular includes the plural unless specifically stated otherwise. As used herein, the use of “or” means “and/or” unless stated otherwise. Furthermore, the use of the term “including” as well as other forms, such as “includes” and “included”, is not limiting. Also, terms such as “element” or “component” encompass both elements and components comprising one unit and elements and components that comprise more than one subunit, unless specifically stated otherwise.

[0014] The section headings used herein are for organizational purposes only and are not to be construed as limiting the subject matter described. All documents, or portions of documents, cited in this application, including, but not limited to, patents, patent applications, articles, books, treatises, and GenBank and NCBI reference sequence records are hereby expressly incorporated by reference for the portions of the document discussed herein, as well as in their entirety.

[0015] It is understood that the sequence set forth in each SEQ ID NO in the examples contained herein is independent of any modification to a sugar moiety, an internucleoside linkage, or a nucleobase. As such, antisense compounds defined by a SEQ ID NO may comprise, independently, one or more modifications to a sugar moiety, an internucleoside linkage, or a nucleobase. Antisense compounds described by ISIS number (ISIS #) indicate a combination of nucleobase sequence, chemical modification, and motif.

[0016] Unless otherwise indicated, the following terms have the following meanings:
[0017] “2′-deoxynucleoside” means a nucleoside comprising 2′-H(H) furanosyl sugar moiety, as found in naturally occurring deoxyribonucleic acids (DNA). In certain embodiments, a 2′-deoxynucleoside may comprise a modified nucleobase or may comprise an RNA nucleobase (e.g., uracil).
[0018] “2′-O-methoxyethyl” (also 2′-MOE and 2′-O(CH₂)₂—OCH₃) refers to an O-methoxy-ethyl modification at the 2′ position of a sugar ring, e.g. a furanose ring. A 2′-O-methoxyethyl modified sugar is a modified sugar.
[0019] “2′-MOE nucleoside” (also 2′-O-methoxyethyl nucleoside) means a nucleoside comprising a 2′-MOE modified sugar moiety.
[0020] “2′-substituted nucleoside” or “2-modified nucleoside” means a nucleoside comprising a 2′-substituted or 2′-modified sugar moiety. As used herein, “2′-substituted” or “2-modified” in reference to a sugar moiety means a furanosyl sugar moiety comprising a 2′-substituent group other than H or OH.
[0021] “3′ target site” refers to the nucleotide of a target nucleic acid which is complementary to the 3′-most nucleotide of a particular antisense compound.
[0022] “5′ target site” refers to the nucleotide of a target nucleic acid which is complementary to the 5′-most nucleotide of a particular antisense compound.
[0023] “5-methylcytosine” means a cytosine modified with a methyl group attached to the 5 position. A 5-methylcytosine is a modified nucleobase.

[0024] “About” means within ±10% of a value. For example, if it is stated, “the compounds affected at least about 70% inhibition of DGAT2”, it is implied that DGAT2 levels are inhibited within a range of 60% and 80%.

[0025] “Administration” or “administering” refers to routes of introducing a compound or composition provided herein to an individual to perform its intended function. An example of a route of administration that can be used includes, but is not limited to parenteral administration, such as subcutaneous, intravenous, or intramuscular injection or infusion.

[0026] “Administered concomitantly” or “co-administration” means administration of two or more compounds in any manner in which the pharmacological effects of both are manifest in the patient. Concomitant administration does not require that both agents be administered in a single pharmaceutical composition, in the same dosage form, by the same route of administration, or at the same time. The effects of both agents need not manifest themselves at the same time. The effects need only be overlapping for a period of time and need not be coextensive. Concomitant administration or co-administration encompasses administration in parallel or sequentially.

[0027] “Amelioration” refers to a lessening of at least one indicator, sign, or symptom of an associated disease, disorder, or condition. In certain embodiments, amelioration includes a delay or slowing in the progression of one or more indicators of a condition or disease. The severity of indicators may be determined by subjective or objective measures, which are known to those skilled in the art.

[0028] “Animal” refers to a human or non-human animal, including, but not limited to, mice, rats, rabbits, dogs, cats, pigs, and non-human primates, including, but not limited to, monkeys and chimpanzees.

[0029] “Antisense activity” means any detectable or measurable activity attributable to the hybridization of an antisense compound to its target nucleic acid. In certain embodiments, antisense activity is a decrease in the amount or expression of a target nucleic acid or protein encoded by such target nucleic acid compared to target nucleic acid levels or target protein levels in the absence of the antisense compound to the target.

[0030] “Antisense compound” means a compound comprising an antisense oligonucleotide and optionally one or more additional features, such as a conjugate group or terminal group. Examples of antisense compounds include single-stranded and double-stranded compounds. Examples are antisense oligonucleotides, ribozymes, siRNAs, shRNAs, ssRNAs, and occupancy-based compounds.

[0031] “Antisense inhibition” means reduction of target nucleic acid levels in the presence of an antisense compound complementary to a target nucleic acid compared to target nucleic acid levels in the absence of the antisense compound.

[0032] “Antisense mechanisms” are all those mechanisms involving hybridization of a compound with target nucleic acid, wherein the outcome or effect of the hybridization is either target degradation or target occupancy with concomitant stalling of the cellular machinery involving, for example, transcription or splicing.

[0033] “Antisense oligonucleotide” means an oligonucleotide having a nucleobase sequence that is complementary to a target nucleic acid or a region or segment thereof. In certain embodiments, an antisense oligonucleotide is specifically hybridizable to a target nucleic acid or a region or segment thereof.

[0034] “Bicyclic nucleoside” or “BNA” means a nucleoside comprising a bicyclic sugar moiety. As used herein, “bicyclic sugar” or “bicyclic sugar moiety” means a modified sugar moiety comprising two rings, wherein the second ring is formed via a bridge connecting two of the atoms in the first ring thereby forming a bicyclic structure. In certain embodiments, the first ring of the bicyclic sugar moiety is a furanosyl moiety. In certain embodiments, the bicyclic sugar moiety does not comprise a furanosyl moiety.

[0035] “Branching group” means a group of atoms having at least 3 positions that are capable of forming covalent linkages to at least 3 groups. In certain embodiments, a branching group provides a plurality of reactive sites for connecting tethered ligands to an oligonucleotide via a conjugate linker and/or a cleavable moiety.

[0036] “Cell-targeting moiety” means a conjugate group or portion of a conjugate group that is capable of binding to a particular cell type or particular cell types.

[0037] “Cleavable moiety” means a bond or group of atoms that is cleaved under physiological conditions, for example, inside a cell, an animal, or a human.

[0038] “cEt” or “constrained ethyl” means a bicyclic sugar moiety comprising a bridge connecting the 4′-carbon and the 2′-carbon, wherein the bridge has the formula: 4′-CH(CH₃)—O-2′.

[0039] “Chemical modification” means a chemical difference in a compound when compared to a naturally occurring counterpart. Chemical modifications of oligonucleotides include nucleoside modifications (including sugar moiety modifications and nucleobase modifications) and internucleoside linkage modifications. In reference to an oligonucleotide, chemical modification does not include differences only in nucleobase sequence.

[0040] “Chemically distinct region” refers to a region of an antisense compound that is in some way chemically different than another region of the same antisense compound. For example, a region having 2′-O-methoxyethyl nucleotides is chemically distinct from a region having nucleotides without 2′-O-methoxyethyl modifications.

[0041] “Chimeric antisense compounds” means antisense compounds that have at least 2 chemically distinct regions, each position having a plurality of subunits.

[0042] “Cleavable bond” means any chemical bond capable of being split. In certain embodiments, a cleavable bond is selected from among: an amide, a polyamide, an ester, an ether, one or both esters of a phosphodiester, a phosphate ester, a carbamate, a di-sulfide, or a peptide.

[0043] “Cleavable moiety” means a bond or group of atoms that is cleaved under physiological conditions, for example, inside a cell, an animal, or a human.

[0044] “Complementary” in reference to an oligonucleotide means the nucleobase sequence of such oligonucleotide or one or more regions thereof matches the nucleobase sequence of another oligonucleotide or nucleic acid or one or more regions thereof when the two nucleobase sequences are aligned in opposing directions. Nucleobase matches or complementary nucleobases, as described herein, are limited to adenine (A) and thymine (T), adenine (A) and uracil (U), cytosine (C) and guanine (G), and 5-methyl cytosine (mC) and guanine (G) unless otherwise specified. Complementary oligonucleotides and/or nucleic acids need not have nucleobase complementarity at each nucleoside and may include one or more nucleobase mismatches. By contrast, “fully complementary” or “100% complementary” in reference to oligonucleotides means that such oligonucleotides have nucleobase matches at each nucleoside without any nucleobase mismatches.

[0045] “Conjugate group” means a group of atoms that is directly or indirectly attached to a parent compound, e.g., an oligonucleotide.

[0046] “Conjugate linker” means a group of atoms that connects a conjugate group to a parent compound, e.g., an oligonucleotide.

[0047] “Constrained ethyl nucleoside” (also cEt nucleoside) means a nucleoside comprising a bicyclic sugar moiety comprising a 4′-CH(CH₃)—O-2′ bridge.

[0048] “Contiguous” in the context of an oligonucleotide refers to nucleosides, nucleobases, sugar moieties, or internucleoside linkages that are immediately adjacent to each other. For example, “contiguous nucleobases” means nucleobases that are immediately adjacent to each other.

[0049] “Designing” or “Designed to” refer to the process of designing an oligomeric compound that specifically hybridizes with a selected nucleic acid molecule.

[0050] “DGAT2” means any nucleic acid or protein of DGAT2. “DGAT2 nucleic acid” means any nucleic acid encoding DGAT2. For example, in certain embodiments, a DGAT2 nucleic acid includes a DNA sequence encoding DGAT2, an RNA sequence transcribed from DNA encoding DGAT2 (including genomic DNA comprising introns and exons), including a non-protein encoding (i.e. non-coding) RNA sequence, and an mRNA sequence encoding DGAT2. “DGAT2 mRNA” means an mRNA encoding a DGAT2 protein.

[0051] “DGAT2 specific inhibitor” refers to any agent capable of specifically inhibiting DGAT2 RNA and/or DGAT2 protein expression or activity at the molecular level. For example, DGAT2 specific inhibitors include nucleic acids (including antisense compounds), peptides, antibodies, small molecules, and other agents capable of inhibiting the expression of DGAT2 RNA and/or DGAT2 protein.

[0052] “Dose” means a specified quantity of a pharmaceutical agent provided in a single administration, or in a specified time period. In certain embodiments, a dose may be administered in two or more boluses, tablets, or injections. For example, in certain embodiments, where subcutaneous administration is desired, the desired dose may require a volume not easily accommodated by a single injection. In such embodiments, two or more injections may be used to achieve the desired dose. In certain embodiments, a dose may be administered in two or more injections to minimize injection site reaction in an individual. In other embodiments, the pharmaceutical agent is administered by infusion over an extended period of time or continuously. Doses may be stated as the amount of pharmaceutical agent per hour, day, week or month.

[0053] “Dosing regimen” is a combination of doses designed to achieve one or more desired effects.

[0054] “Double-stranded antisense compound” means an antisense compound comprising two oligomeric compounds that are complementary to each other and form a duplex, and wherein one of the two said oligomeric compounds comprises an antisense oligonucleotide.

[0055] “Effective amount” means the amount of compound sufficient to effectuate a desired physiological outcome in an individual in need of the agent. The effective amount may vary among individuals depending on the health and physical condition of the individual to be treated, the taxonomic group of the individuals to be treated, the formulation of the composition, assessment of the individual's medical condition, and other relevant factors.

[0056] “Efficacy” means the ability to produce a desired effect.

[0057] “Expression” includes all the functions by which a gene's coded information is converted into structures present and operating in a cell. Such structures include, but are not limited to the products of transcription and translation.

[0058] “Fully modified” in reference to an oligonucleotide means a modified oligonucleotide in which each nucleoside is modified. “Uniformly modified” in reference to an oligonucleotide means a fully modified oligonucleotide in which at least one modification of each nucleoside is the same. For example, the nucleosides of a uniformly modified oligonucleotide can each have a 2′-MOE modification but different nucleobase modifications, and the internucleoside linkages may be different.

[0059] “Gapmer” means a chimeric antisense compound in which an internal region having a plurality of nucleosides that is positioned between external regions having one or more nucleosides, wherein the nucleosides comprising the internal region are chemically distinct from the nucleoside or nucleosides comprising the external regions. The internal region may be referred to as the “gap” and the external regions may be referred to as the “wings.” In certain embodiments, the structure of a gapmer may support RNase H cleavage.

[0060] “Hybridization” means the pairing or annealing of complementary oligonucleotides and/or nucleic acid molecules. While not limited to a particular mechanism, the most common mechanism of hybridization involves hydrogen bonding, which may be Watson-Crick, Hoogsteen or reversed Hoogsteen hydrogen bonding, between complementary nucleobases. In certain embodiments, complementary nucleic acid molecules include, but are not limited to, an antisense compound and a nucleic acid target. In certain embodiments, complementary nucleic acid molecules include, but are not limited to, an antisense oligonucleotide and a nucleic acid target.

[0061] “Identifying an animal having, or at risk for having, a disease, disorder and/or condition” means identifying an animal having been diagnosed with the disease, disorder and/or condition or identifying an animal predisposed to develop the disease, disorder and/or condition. Such identification may be accomplished by any method including evaluating an individual's medical history and standard clinical tests or assessments.

[0062] “Immediately adjacent” means there are no intervening elements between the immediately adjacent elements of the same kind (e.g. no intervening nucleobases between adjacent nucleobases).

[0063] “Individual” means a human or non-human animal selected for treatment or therapy.

[0064] “Inhibiting the expression or activity” refers to a reduction, blockade of the expression or activity relative to the expression or activity in an untreated or control sample, and does not necessarily indicate a total elimination of expression or activity.

[0065] “Internucleoside linkage” means a group or bond that forms a covalent linkage between adjacent nucleosides in an oligonucleotide. As used herein “modified internucleoside linkage” means any internucleoside linkage other than a naturally occurring, phosphate internucleoside linkage. Naturally occurring, non-phosphate linkages are referred to herein as modified internucleoside linkages. “Phosphorothioate linkage” means a linkage between nucleosides wherein the phosphodiester bond of a phosphate linkage is modified by replacing one of the non-bridging oxygen atoms with a sulfur atom. A phosphorothioate linkage is a modified internucleoside linkage.

[0066] “Lengthened” antisense oligonucleotides are those that have one or more additional nucleosides relative to an antisense oligonucleotide disclosed herein; e.g. a parent oligonucleotide.

[0067] “Linearly modified sugar” or “linearly modified sugar moiety” means a modified sugar moiety that comprises an acyclic or non-bridging modification. Such linear modifications are distinct from bicyclic sugar modifications.

[0068] “Linked deoxynucleoside” means a nucleic acid base (A, G, C, T, U) substituted by deoxyribose linked by a phosphate ester to form a nucleotide.

[0069] “Linked nucleosides” are nucleosides that are connected in a continuous sequence (i.e. no additional nucleosides are present between those that are linked).

[0070] As used herein, “mismatch” or “non-complementary” means a nucleobase of a first oligonucleotide that is not complementary to the corresponding nucleobase of a second oligonucleotide or target nucleic acid when the first and second oligonucleotides are aligned. For example, a universal nucleobase, inosine, and hypoxanthine, are capable of hybridizing with at least one nucleobase but are still mismatched or non-complementary with respect to nucleobase to which it hybridized. As another example, a nucleobase of a first oligonucleotide that is not capable of hybridizing to the corresponding nucleobase of a second oligonucleotide or target nucleic acid when the first and second oligonucleotides are aligned is a mismatch or non-complementary nucleobase.

[0071] “Modified nucleobase” means any nucleobase other than adenine, cytosine, guanine, thymidine, or uracil. An “unmodified nucleobase” means the purine bases adenine (A) and guanine (G), and the pyrimidine bases thymine (T), cytosine (C) and uracil (U). A “universal base” is a nucleobase that can pair with any one of the five unmodified nucleobases.

[0072] “Modified nucleoside” means a nucleoside having, independently, a modified sugar moiety and/or modified nucleobase.

[0073] “Modified nucleotide” means a nucleotide having, independently, a modified sugar moiety, modified internucleoside linkage, or modified nucleobase.

[0074] “Modified oligonucleotide” means an oligonucleotide comprising at least one modified internucleoside linkage, a modified sugar, and/or a modified nucleobase.

[0075] “Modulating” refers to changing or adjusting a feature in a cell, tissue, organ or organism. For example, modulating DGAT2 RNA can mean to increase or decrease the level of DGAT2 RNA and/or DGAT2 protein in a cell, tissue, organ or organism. A “modulator” effects the change in the cell, tissue, organ or organism. For example, a DGAT2 antisense compound can be a modulator that decreases the amount of DGAT2 RNA and/or DGAT2 protein in a cell, tissue, organ or organism.

[0076] “Monomer” refers to a single unit of an oligomer. Monomers include, but are not limited to, nucleosides and nucleotides, whether naturally occurring or modified.

[0077] “Motif” means the pattern of unmodified and/or modified sugar moieties, nucleobases, and/or internucleoside linkages, in an oligonucleotide.

[0078] “Natural” or “Naturally occurring” means found in nature. “Naturally occurring internucleoside linkage” means a 3′ to 5′ phosphodiester linkage. “Natural sugar moiety” means a sugar moiety found in DNA (2′-H) or RNA (2′-OH). “Naturally occurring nucleobase” means the purine bases adenine (A) and guanine (G), and the pyrimidine bases thymine (T), cytosine (C) and uracil (U). “Non-complementary nucleobase” refers to a pair of nucleobases that do not form hydrogen bonds with one another or otherwise support hybridization.

[0079] “Nucleic acid” refers to molecules composed of monomeric nucleotides. A nucleic acid includes, but is not limited to, ribonucleic acids (RNA), deoxyribonucleic acids (DNA), single-stranded nucleic acids, and double-stranded nucleic acids.

[0080] “Nucleobase” means a heterocyclic moiety capable of pairing with a base of another nucleic acid.

[0081] “Nucleobase sequence” means the order of contiguous nucleobases independent of any sugar, linkage, and/or nucleobase modification.

[0082] “Nucleoside” means a compound comprising a nucleobase and a sugar moiety. The nucleobase and sugar moiety are each, independently, unmodified or modified.

[0083] “Nucleotide” means a nucleoside having a phosphate group covalently linked to the sugar portion of the nucleoside.

[0084] “Oligomeric compound” means a compound comprising an oligonucleotide and optionally one or more additional features, such as a conjugate group or terminal group. Examples of oligomeric compounds include single-stranded and double-stranded compounds, such as, antisense compounds, antisense oligonucleotides, ribozymes, siRNAs, shRNAs, ssRNAs, and occupancy-based compounds.

[0085] “Oligonucleoside” means an oligonucleotide in which the internucleoside linkages do not contain a phosphorus atom.

[0086] “Oligonucleotide” means a polymer of linked nucleosides each of which can be modified or unmodified, independent one from another.

[0087] “Parent oligonucleotide” means an oligonucleotide whose sequence is used as the basis of design for more oligonucleotides of similar sequence but with different lengths, motifs, and chemistries. The newly designed oligonucleotides may have the same or overlapping sequence as the parent oligonucleotide.

[0088] “Parenteral administration” means administration through injection or infusion. Parenteral administration includes subcutaneous administration, intravenous administration, intramuscular administration, intraarterial administration, intraperitoneal administration, or intracranial administration, e.g. intrathecal or intracerebroventricular administration.

[0089] “Pharmaceutically acceptable carrier or diluent” means a medium or diluent suitable for use in administering to an animal. For example, a pharmaceutically acceptable carrier can be a sterile aqueous solution, such as PBS or water-for-injection.

[0090] “Pharmaceutically acceptable salts” means physiologically and pharmaceutically acceptable salts of compounds, such as oligomeric compounds or antisense compounds, i.e., salts that retain the desired biological activity of the parent compound and do not impart undesired toxicological effects thereto.

[0091] “Pharmaceutical agent” means a compound that provides a therapeutic benefit when administered to an individual.

[0092] “Pharmaceutical composition” means a mixture of compounds suitable for administering to an individual. For example, a pharmaceutical composition may comprise one or more compounds or salts thereof and a sterile aqueous solution.

[0093] “Phosphorothioate linkage” means a modified internucleoside linkage between nucleosides where the phosphodiester bond is modified by replacing one of the non-bridging oxygen atoms with a sulfur atom.

[0094] “Phosphorus moiety” means a group of atoms comprising a phosphorus atom. In certain embodiments, a phosphorus moiety comprises a mono-, di-, or tri-phosphate, or phosphorothioate.

[0095] “Portion” means a defined number of contiguous (i.e., linked) nucleobases of a nucleic acid. In certain embodiments, a portion is a defined number of contiguous nucleobases of a target nucleic acid. In certain embodiments, a portion is a defined number of contiguous nucleobases of an oligomeric compound

[0096] “Prevent” refers to delaying or forestalling the onset, development or progression of a disease, disorder, or condition for a period of time from minutes to indefinitely. Prevent may also mean reducing the risk of developing a disease, disorder, or condition.

[0097] “Prodrug” means a form of a compound which, when administered to an individual, is metabolized to another form. In certain embodiments, the metabolized form is the active, or more active, form of the compound (e.g., drug).

[0098] “Prophylactically effective amount” refers to an amount of a pharmaceutical agent that provides a prophylactic or preventative benefit to an animal.

[0099] “Ref Seq No.” is a unique combination of letters and numbers assigned to a sequence to indicate the sequence is for a particular target transcript (e.g., target gene). Such sequence and information about the target gene (collectively, the gene record) can be found in a genetic sequence database. Genetic sequence databases include the NCBI Reference Sequence database, GenBank, the European Nucleotide Archive, and the DNA Data Bank of Japan (the latter three forming the International Nucleotide Sequence Database Collaboration or INSDC).

[0100] “Region” is defined as a portion of the target nucleic acid having at least one identifiable structure, function, or characteristic.

[0101] “Ribonucleotide” means a nucleotide having a hydroxy at the 2′ position of the sugar portion of the nucleotide.

[0102] “RNAi compound” means an oligomeric compound that acts, at least in part, through RISC or Ago2 to modulate a target nucleic acid and/or protein encoded by a target nucleic acid. RNAi compounds include, but are not limited to double-stranded siRNA, single-stranded RNA (ssRNA), and microRNA, including microRNA mimics. The term RNAi compound excludes antisense oligonucleotides that act through RNase H.

[0103] “Segment” is defined as a smaller or sub-portion of region within an antisense compound, an oligonucleotide, or a target nucleic acid.

[0104] “Side effects” means physiological disease and/or conditions attributable to a treatment other than the desired effects. In certain embodiments, side effects include injection site reactions, liver function test abnormalities, renal function abnormalities, liver toxicity, renal toxicity, central nervous system abnormalities, myopathies, and malaise. For example, increased aminotransferase levels in serum may indicate liver toxicity or liver function abnormality. For example, increased bilirubin may indicate liver toxicity or liver function abnormality.

[0105] “Single-stranded” in reference to an antisense compound or oligomeric compound means there is one oligonucleotide in the compound. “Self-complementary” in reference to an antisense compound or oligomeric compound means a compound that at least partially hybridizes to itself. A compound consisting of one antisense or oligomeric compound, wherein the oligonucleotide of the compound is self-complementary, is a single-stranded compound. A single-stranded antisense or oligomeric compound may be capable of binding to a complementary compound to form a duplex.

[0106] “Sites,” as used herein, are defined as unique nucleobase positions within a target nucleic acid.

[0107] “Slows progression” means decrease in the development of the said disease.

[0108] “Specifically hybridizable” refers to an antisense compound having a sufficient degree of complementarity between an antisense oligonucleotide and a target nucleic acid to induce a desired effect, while exhibiting minimal or no effects on non-target nucleic acids.

[0109] “Specifically inhibit” a target nucleic acid means to reduce or block expression of the target nucleic acid while exhibiting fewer, minimal, or no effects on non-target nucleic acids reduction and does not necessarily indicate a total elimination of the target nucleic acid's expression.

[0110] “Sugar moiety” means a group of atoms that can link a nucleobase to another group, such as an internucleoside linkage, conjugate group, or terminal group. In certain embodiments, a sugar moiety is attached to a nucleobase to form a nucleoside. As used herein, “unmodified sugar moiety” or “unmodified sugar” means a 2′-OH(H) furanosyl moiety, as found in RNA, or a 2′-H(H) moiety, as found in DNA. Unmodified sugar moieties have one hydrogen at each of the 1′, 3′, and 4′ positions, an oxygen at the 3′ position, and two hydrogens at the 5′ position. As used herein, “modified sugar moiety” or “modified sugar” means a furanosyl moiety comprising a non-hydrogen substituent in place of at least one hydrogen of an unmodified sugar moiety, or a sugar surrogate. In certain embodiments, a modified sugar moiety is a 2′-substituted sugar moiety. Such modified sugar moieties include bicyclic sugars and linearly modified sugars.

[0111] “Sugar surrogate” means a modified sugar moiety having other than a furanosyl moiety that can link a nucleobase to another group, such as an internucleoside linkage, conjugate group, or terminal group. Modified nucleosides comprising sugar surrogates can be incorporated into one or more positions within an oligonucleotide. In certain embodiments, such oligonucleotides are capable of hybridizing to complementary oligomeric compounds or nucleic acids.

[0112] “Synergy” or “synergize” refers to an effect of a combination that is greater than additive of the effects of each component alone.

[0113] “Target gene” refers to a gene encoding a target.

[0114] “Target nucleic acid,” “target RNA,” “target RNA transcript” and “nucleic acid target” mean a nucleic acid capable of being targeted by antisense compounds.

[0115] “Targeting” means the process of design and selection of an antisense compound that will specifically hybridize to a target nucleic acid and induce a desired effect.

[0116] “Target region” means a portion of a target nucleic acid to which one or more antisense compounds is targeted.

[0117] “Target segment” means the sequence of nucleotides of a target nucleic acid to which an antisense compound is targeted. “5′ target site” refers to the 5′-most nucleotide of a target segment. “3′ target site” refers to the 3′-most nucleotide of a target segment.

[0118] “Terminal group” means a chemical group or group of atoms that is covalently linked to a terminus of an oligonucleotide.

[0119] “Therapeutically effective amount” means an amount of a compound, pharmaceutical agent, or composition that provides a therapeutic benefit to an individual.

[0120] “Treat” refers to administering a compound or pharmaceutical composition to an animal in order to effect an alteration or improvement of a disease, disorder, or condition in the animal.

[0121] “Unmodified” nucleobases mean the purine bases adenine (A) and guanine (G), and the pyrimidine bases thymine (T), cytosine (C) and uracil (U).

[0122] “Unmodified nucleotide” means a nucleotide composed of naturally occurring nucleobases, sugar moieties, and internucleoside linkages. In certain embodiments, an unmodified nucleotide is an RNA nucleotide (i.e. β-D-ribonucleotides) or a DNA nucleotide (i.e. β-D-deoxyribonucleotide).

### Certain Embodiments

[0123] Certain embodiments provide methods, compounds and compositions for inhibiting DGAT2 (DGAT2) expression.

[0124] Certain embodiments provide antisense compounds targeted to a DGAT2 nucleic acid. In certain embodiments, the DGAT2 nucleic acid has the sequence set forth in Ref Seq No. NM_032564.3 (incorporated by reference, disclosed herein as SEQ ID NO: 1) or nucleotides 5669186 to 5712008 of Ref Seq No. NT_033927.5 (incorporated by reference, disclosed herein as SEQ ID NO: 2). In certain embodiments, the antisense compound is a single-stranded oligonucleotide.

[0125] Certain embodiments provide an antisense compound comprising a modified oligonucleotide consisting of 10 to 30 linked nucleosides and having a nucleobase sequence comprising at least 8 contiguous nucleobases of any of the nucleobase sequences of SEQ ID NOs: 16-4679. In certain embodiments, the antisense compound is a single-stranded oligonucleotide.

[0126] Certain embodiments provide an antisense compound comprising a modified oligonucleotide consisting of 10 to 30 linked nucleosides and having a nucleobase sequence comprising at least 9, at least 10, at least 11, or at least 12 contiguous nucleobases of any of the nucleobase sequences of SEQ ID NOs: 16-4679. In certain embodiments, the antisense compound is a single-stranded oligonucleotide.

[0127] Certain embodiments provide an antisense compound comprising a modified oligonucleotide consisting of 10 to 30 linked nucleosides and having a nucleobase sequence comprising the nucleobase sequence of any one of SEQ ID NOs: 16-4679. In certain embodiments, the antisense compound is a single-stranded oligonucleotide.

[0128] Certain embodiments provide an antisense compound comprising a modified oligonucleotide consisting of the nucleobase sequence of any one of SEQ ID NOs: 16-4679. In certain embodiments, the antisense compound is a single-stranded oligonucleotide.

[0129] In certain embodiments, antisense compounds or antisense oligonucleotides target the 26711-26802 of a DGAT2 nucleic acid. In certain aspects, antisense compounds or antisense oligonucleotides target within nucleotides 26711-26802 of a DGAT2 nucleic acid having the nucleobase sequence of SEQ ID NO: 2 (nucleotides 5669186 to 5712008 of Ref Seq No. NT_033927.5). In certain aspects, antisense compounds or antisense oligonucleotides have at least an 8, 9, 10, 11, 12, 13, 14, 15, or 16 contiguous nucleobase portion complementary to an equal length portion within nucleotides 26711-26802 of a DGAT2 nucleic acid having the nucleobase sequence of SEQ ID NO: 2 (nucleotides 5669186 to 5712008 of Ref Seq No. NT_033927.5).

[0130] In certain embodiments, antisense compounds or antisense oligonucleotides target a region of a DGAT2 nucleic acid having the nucleobase sequence of SEQ ID NO: 2 within nucleobases 26711-26799, 26711-26730, 26721-26740, 26755-26744, 26778-26797, 26779-26798, 26755-26798, and 26780-26799. In certain aspects, antisense compounds or antisense oligonucleotides target at least an 8, 9, 10, 11, 12, 13, 14, 15, or 16 contiguous nucleobases within the aforementioned nucleobase regions.

[0131] In certain embodiments, the following nucleotide regions of SEQ ID NO: 2, when targeted by antisense compounds or oligonucleotides, display at least 60% inhibition: 9930-9949, 9953-9973, 9959-9978, 9961-9981, 9970-9992, 9975-9994, 9984-10003, 10040-10059, 10043-10063, 10045-10064, 10046-10065, 10049-10068, 10054-10073, 10160-10179, 10209-10229, 10212-10231, 10214-10235, 10217-10236, 10218-10238, 10327-10346, 10389-10413, 10490-10511, 10522-10548, 10530-10549, 10531-10551, 10533-10553, 10645-10669, 10651-10670, 10653-10673, 10655-10674, 10656-10675, 10657-10676, 10658-10680, 10662-10681, 10663-10684, 10666-10685, 10667-10684, 10670-10689, 10702-10721, 10727-10747, 10729-10748, 10730-10750, 10733-10755, 10737-10756, 10742-10761, 10763-10782, 10814-10835, 10817-10836, 10818-10837, 10940-10964, 11008-11027, 11074-11097, 11123-11150, 11158-11182, 11168-11187, 11170-11190, 11171-11197, 11199-11218, 11200-11220, 11209-11228, 11318-11342, 11413-11432, 11559-11578, 11594-11618, 11707-11731, 11872-11891, 11920-11939, 12247-12266, 12285-12304, 12549-12573, 12671-12695, 12806-12826, 12839-12863, 12890-12909, 12927-12961, 13098-13117, 13212-13231, 13239-13258, 13441-13461, 13921-13945, 13962-13996, 14177-14201, 14194-14218, 14239-14258, 14385-14404, 14457-14522, 14504-14527, 14537-14556, 14648-14697, 14715-14790, 14715-14739, 14735-14764, 14746-14765, 14749-14774, 14756-14779, 14765-14789, 14771-14790, 14807-14831, 14852-14871, 14882-14901, 14953-15015, 14997-15065, 15041-15107, 15041-15092, 15083-15107, 15178-15197, 15214-15243, 15219-15243, 15248-15276, 15255-15276, 15292-15311, 15318-15338, 15321-15342, 15353-15372, 15368-15392, 15514-15533, 15573-15665, 15573-15597, 15729-15753, 15804-15828, 15814-15833, 15876-15900, 15876-15896, 15933-15962, 15933-15954, 15991-16010, 16046-16073, 16082-16124, 16237-16256, 16288-16314, 16288-16478, 16308-16329, 16428-16478, 16510-16529, 16808-16855, 16808-16828, 16811-16855, 16898-16921, 17007-17031, 17038-17057, 17207-17229, 17269-17298, 17273-17294, 17328-17357, 17420-17444, 17450-17471, 17530-17559, 17328-17559, 17960-17989, 18078-18097, 18155-18176, 18155-18198, 18177-18200, 18225-18305, 18306-18327, 18309-18330, 18312-18330, 18312-18332, 18315-18344, 18329-18355, 18379-18398, 18417-18446, 18430-18451, 1818450-18473, 18470-18494, 18581-18601, 18583-18605, 18581-18611, 18588-18611, 18821-18850, 18821-18847, 18836-18899, 18890-18914, 18898-18919, 19013-19037, 19013-19040, 19360-19411, 19363-19383, 19804-19823, 19909-19932, 19987-20009, 20232-20256, 20296-20325, 20462-20481, 20541-20560, 20668-20692, 20775-20797, 20779-20797, 20817-20841, 20828-20863, 20878-20897, 20956-20979, 21046-21120, 21091-21120, 21164-21203, 21164-21188, 21374-21403, 21659-21678, 21708-21727, 21765-21784, 21933-21955, 22153-22191, 22153-22175, 22158-22179, 22167-22191, 22439-22463, 22547-22567, 22770-22790, 22770-22795, 22775-22795, 22835-22870, 22841-22865, 22881-22901, 22885-22905, 22889-22910, 23095-23115, 23098-23119, 23099-23119, 23128-23157, 23179-23251, 23238-23258, 23240-23260, 23242-23262, 23429-23449, 23480-23566, 23547-23581, 23553-23573, 23555-23576, 23562-23586, 23597-23616, 23641-23670, 24123-24144, 24123-24147, 24202-24223, 24202-24241, 24799-25039, 24799-24847, 25018-2509, 25023-25053, 25026-25053, 25069-25092, 25069-25114, 25077-25104, 25088-25114, 25183-25205, 25183-25217, 25198-25217, 25226-25250, 25226-25265, 25236-25260, 25244-25291, 25312-25394, 25380-25400, 25717-25736, 25782-25860, 25845-25866, 25866-25935, 25919-25939, 25950-25971, 25954-25973, 25981-26030, 26102-26126, 26162-26220, 26300-26324, 26331-26372, 26363-26405, 26389-26409, 26396-26420, 26479-26504, 26516-26550, 26534-26555, 26534-26560, 26540-26560, 26610-26634, 26620-26640, 26626-26648, 26620-26664, 26633-26655, 26640-26664, 26716-26740, 26716-26799, 26755-26799, 26786-26807, 26789-26809, 26786-26809, 26811-26831, 26849-26869, 26869-26898, 26883-26903, 26926-26943, 27046-27075, 27106-27130, 27174-27230, 27221-27241, 27226-27258, 27241-27265, 27249-27269, 27367-27406, 27367-27402, 27386-27406, 27638-27664, 27769-27791, 27775-27810, 27852-27877, 28026-28049, 28128-28154, 28462-28492, 28475-28508, 28516-28542, 28584-28605, 28804-28826, 29010-29035, 29143-29167, 29151-29180, 29196-29218, 29244-29268, 29253-29282, 29361-29383, 29369-29391, 29450-29495, 29480-29504, 29538-29654, 29673-29697, 29681-29702, 29781-29801, 29804-29828, 29827-29847, 29832-29852, 29838-29858, 29844-29878, 30484-30504, 30524-30548, 30554-30588, 30669-30731, 30972-30997, 30984-31005, 31551-31571, 31554-31584, 31794-31818, 31932-31952, 31936-31956, 31939-31963, 31946-31971, 32115-32136, 32119-32140, 32130-32159, 32175-32201, 32428-32454, 32436-32467, 32459-32479, 32463-32489, 32474-32495, 32480-32529, 32586-32638, 32621-32641, 32756-32776, 32801-32825, 32816-32840, 33070-33180, 33176-33199, 33182-33202, 33411-33433, 33572-33601, 33729-33759, 33846-33876, 33860-33882, 33866-33886, 34063-34117, 34211-34232, 34686-34710, 34739-34887, 34901-34950, 35263-35292, 35277-35302, 35322-35346, 35408-35433, 35421-35441, 35436-35457, 35665-35685, 36246-36267, 36250-36270, 36253-36274, 36258-36281, 36268-36531, 36516-36537, 36573-36597, 36581-36603, 36632-36666, 36677-36698, 36682-36702, 36689-36757, 36742-36772, 36841-36874, 36846-36874, 36865-37041, 37054-37073, 37838-37858, 39668-39694, 39684-39705, 39820-39840, 39830-39852, and 40909-40933.

[0132] In certain embodiments, the following nucleotide regions of SEQ ID NO: 2, when targeted by antisense compounds or oligonucleotides, display at least 70% inhibition: 9971-9991, 9975-9994, 9984-10003, 10040-10059, 10044-10063, 10045-10064, 10049-10068, 10054-10179, 10210-10229, 10214-10234, 10216-10235, 10217-10236, 10218-10237, 10327-10346, 10490-10509, 10491-10511, 10522-10541, 10528-10548, 10530-10549, 10531-10550, 10532-10551, 10533-10553, 10536-10555, 10537-10556, 10645-10664, 10647-10666, 10649-10669, 10653-10673, 10655-10674, 10656-10675, 10657-10676, 10658-10677, 10659-10679, 10661-10680, 10662-10681, 10663-10683, 10665-10684, 10666-10685, 10667-10686, 10668-10687, 10670-10689, 10672-10691, 10702-10721, 10727-10747, 10729-10748, 10730-10750, 10732-10751, 10733-10752, 10734-10753, 10735-10754, 10737-10756, 10742-10756, 10742-10761, 10763-10782, 10815-10835, 10817-10836, 10818-10837, 10819-10840, 10940-10959, 10941-10960, 10942-10961, 10944-10963, 11008-11027, 11074-11093, 11075-11094, 11076-11095, 11078-11097, 11124-11146, 11128-11147, 11129-11148, 11130-11149, 11131-11177, 11159-11178, 11160-11179, 11161-11180, 11168-11187, 11170-11190, 11172-11191, 11173-11192, 11174-11196, 11180-11218, 11200-11219, 11201-11221, 11203-11222, 11204-11220, 11209-11228, 11323-11342, 11413-11432, 11559-11578, 11599-11618, 11872-11891, 112285-12304, 12549-12568, 12806-12826, 12809-12828, 12927-12946, 12942-12961, 13441-13461, 13926-13945, 14182-14201, 14194-14213, 14196-14216, 14239-14258, 14385-14404, 14462-14522, 14504-14523, 14505-14524, 14506-14527, 14537-14556, 14648-14667, 14649-14668, 14650-14669, 14651-14670, 14658-14682, 14664-14683, 14665-14684, 14666-14686, 14668-14687, 14673-14739, 14741-14764, 14746-14765, 14749-14774, 14756-14775, 14757-14779, 14765-14784, 14767-14786, 14769-14789, 14771-14790, 14772-14793, 14807-14831, 14852-15005, 14992-15012, 14995-15015, 14997-15016, 14998-15017, 14999-15020, 15011-15040, 15073-15092, 15214-15233, 15219-15243, 15248-15269, 15248-15276, 15251-15270, 15252-15272, 15254-15273, 15255-15274, 15256-15276, 15321-15342, 15573-15595, 15578-15665, 15729-15748, 15809-15828, 15876-15895, 15881-15952, 15991-16066, 16051-16070, 16053-16102, 16289-16309, 16292-16312, 16310-16329, 16248-16448, 16432-16451, 16438-16457, 16808-16828, 16811-16830, 16813-16832, 16815-16835, 16828-16852, 16836-16855, 16898-16917, 16900-16921, 17007-17027, 17207-17227, 17210-17229, 17274-17294, 17328-17347, 17330-17352, 17450-17549, 17960-17979, 18155-18175, 18157-18176, 18160-15180, 18162-18181, 18163-18182, 18164-18183, 18165-18184, 18166-18185, 18172-18193, 18175-18194, 18176-18194, 18176-18195, 18178-18199, 18181-18200, 18225-18244, 18235-18305, 18307-18327, 18309-18328, 18310-18330, 18312-18332, 18315-18337, 18320-18340, 18322-18341, 18323-18342, 18324-18343, 18325-18347, 18330-18355, 18379-18436, 18418-18437, 18419-18438, 18420-18439, 18422-18441, 18431-18451, 18450-18469, 18451-18470, 18452-18471, 18470-18489, 18581-18600, 18582-18601, 18583-18602, 18584-18604, 18588-18610, 18828-18847, 18829-18848, 18831-18850, 18869-18888, 18870-18889, 18899-18919, 19013-19032, 19016-19035, 19018-19037, 19020-19039, 19360-19380, 19364-19383, 19911-19932, 19987-20008, 20232-20251, 20298-20317, 20300-20325, 20668-20689, 20672-20692, 20775-20796, 20780-20800, 20822-20841, 20829-20851, 20837-20857, 20840-20862, 20958-20979, 21164-21183, 21384-21403, 21933-21952, 22155-22175, 22439-22463, 22548-22567, 22549-22568, 22771-22790, 22772-22791, 22773-22792, 22846-22865, 22886-22905, 22888-22907, 22889-22908, 23095-23115, 23098-23117, 23099-23119, 23128-23147, 23138-23157, 23184-23251, 23238-23258, 23242-23261, 23243-23262, 23244-23263, 23245-23264, 23246-23262, 23305-23324, 23426-23446, 23430-23449, 23551-23570, 23552-23571, 23553-23572, 23554-23573, 23557-23576, 23562-23586, 23641-23665, 24123-24142, 24799-24897, 25019-25038, 25023-25042, 25026-25045, 25028-25092, 25075-25094, 25077-25101, 25085-25104, 25088-25202, 25186-25205, 25193-25212, 25198-25250, 25236-25255, 25245-25291, 25312-25394, 25380-25399, 25429-25448, 25717-25808, 25841-25860, 25846-25865, 25900-25928, 25911-25930, 25913-25935, 25920-25971, 25981-26026, 26010-26030, 26102-26121, 26165-26186, 26169-26219, 26300-26324, 26353-26372, 26358-26377, 26363-26404, 26389-26409, 26397-26416, 26479-26498, 26482-26503, 26516-26535, 26517-26536, 26518-26537, 26519-26538, 26520-26540, 26526-26550, 26535-26555, 26537-26556, 26538-26557, 26539-26558, 26615-26634, 26620-26640, 26626-26646, 26628-26647, 26629-26648, 26630-26649, 26631-26650, 26632-26651, 26633-26652, 26635-26654, 26640-26659, 26711-26730, 26721-26799, 26786-26807, 26811-26830, 26852-26871, 26854-26873, 26869-26898, 26883-26903, 26927-26946, 27050-27075, 27106-27125, 27221-27240, 27228-27247, 27231-27250, 27235-27257, 27241-27265, 27249-27268, 27367-27386, 27377-27396, 27379-27398, 27381-27401, 27383-27402, 27387-27406, 27438-27457, 27639-27658, 27642-27661, 27644-27664, 27769-27790, 27775-27799, 27782-27809, 27853-27877, 28026-28048, 28128-28154, 28463-28484, 28468-28489, 28475-28500, 28516-28542, 28806-28826, 29010-28033, 29140-29159, 29143-29165, 29148-29167, 29154-29177, 29160-29180, 29193-29212, 29196-29218, 29201-29220, 29245-29265, 29253-29272, 29255-29274, 29257-29278, 29262-29282, 26361-29382, 29369-29388, 29371-29390, 29485-29504, 29538-29557, 29548-29594, 29635-29654, 29673-29692, 29675-29695, 29678-29697, 29682-29702, 29781-29801, 29809-29828, 29827-59847, 29829-29848, 29830-29849, 29831-29850, 29832-29852, 29838-29858, 29840-29859, 29842-29861, 29843-29862, 29844-29873, 30483-30502, 30484-30503, 30514-30533, 30529-30548, 30559-30578, 30669-30693, 30972-30992, 30977-30996, 30982-31001, 30986-31005, 31554-31573, 31768-31787, 31797-31817, 31933-31952, 31936-31956, 31942-31961, 32116-32135, 32120-32140, 32131-32151, 32135-32158, 32177-32198, 32182-32201, 32336-32355, 32428-32447, 32429-32448, 32430-32449, 32431-32450, 32432-32451, 32433-32452, 32434-32450, 32435-32454, 32436-32455, 32446-32466, 32449-32468, 32450-32469, 32451-32470, 32452-32471, 32453-32472, 32454-32473, 32455-32474, 32456-32475, 32457-32476, 32459-32479, 32461-32480, 32462-32481, 32463-32483, 32465-32486, 32468-32489, 32475-32495, 32477-32496, 32478-32497, 32480-32500, 32510-32529, 32619-32638, 32621-32640, 32622-32641, 32623-32642, 32645-32664, 32670-32689, 32711-32730, 32752-32771, 32753-32772, 32755-32774, 32756-32776, 32816-32840, 33096-33125, 33161-33180, 33179-33199, 33181-33200, 33182-33201, 33412-33433, 33729-33750, 33861-33881, 33866-33885, 33918-33937, 34017-34036, 34211-34231, 34216-34235, 34350-34369, 34460-34479, 34739-34887, 34901-34950, 35278-35298, 35322-35346, 35362-35381, 35410-35430, 35414-35433, 35421-35440, 35436-35457, 35665-36685, 36246-36267, 36249-36268, 36250-36269, 36251-36270, 36252-36271, 36253-36272, 36258-36277, 36262-36281, 36268-36287, 36354-36428, 36512-36531, 36517-36536, 36573-36597, 36582-36602, 36617-36636, 36677-36698, 36680-36699, 36681-36700, 36682-36702, 36691-36754, 36738-36757, 36743-36772, 36758-36777, 36841-36860, 36846-36865, 36865-36942, 37054-37138, 37389-37408, 37497-37516, 37499-37518, 37501-37520, 37745-37764, 39670-39689, 39685-39704, 39820-39839, 39830-39849, 39832-39852, and 40333-40352.

[0133] In certain embodiments, the following nucleotide regions of SEQ ID NO: 2, when targeted by antisense compounds or oligonucleotides, display at least 80% inhibition: 10040-10059, 10044-10063, 10045-10064, 10054-10073, 10210-10229, 10214-10234, 10217-10236, 10490-10509, 10531-10550, 10532-10551, 10533-10552, 10645-10664, 10650-10669, 10655-10674, 10656-10675, 10657-10676, 10659-10678, 10660-10679, 10661-10680, 10663-10682, 10664-10683, 10665-10684, 10666-10685, 10667-10686, 10670-10689, 10727-10746, 10730-10749, 10731-10750, 10732-10751, 10734-10753, 10735-10754, 10737-10756, 10816-10835, 10817-10836, 10818-10837, 10819-10838, 10820-10840, 10940-10959, 10941-10960, 10942-10961, 10944-10963, 11074-11093, 11075-11094, 11127-11146, 11128-11147, 11129-11148, 11130-11149, 11131-11177, 11159-11178, 11160-11179, 11170-11190, 11172-11191, 11173-11192, 11174-11193, 11175-11196, 11178-11197, 11199-11218, 11200-11219, 11201-11220, 11202-11221, 11203-11222, 11559-11578, 11599-11618, 12285-12304, 13442-13461, 14462-14481, 14503-14522, 14504-14523, 14505-14524, 14506-14527, 14648-14667, 14649-14668, 14650-14669, 14651-14670, 14658-14682, 14664-14683, 14666-14686, 14673-14697, 14741-14760, 14743-14764, 14746-14765, 14750-04769, 14752-14774, 14756-14775, 14757-14775, 14758-14777, 14759-14778, 14769-14789, 14771-14790, 14772-14791, 14773-14792, 14774-14793, 14807-14826, 14882-14901, 14986-15005, 14993-15012, 14995-15015, 14997-15016, 14998-15017, 14999-15018, 15000-15019, 15001-15020, 15016-15035, 15248-15268, 15250-15269, 15251-15270, 15252-15272, 15254-15273, 15319-15338, 15321-15342, 15574-15593, 15646-15665, 15881-15952, 16310-16329, 16813-16832, 16830-16852, 16900-16921, 17007-17026, 17208-17227, 17450-17470, 18156-18175, 18157-18176, 18161-18180, 18164-18183, 18166-18185, 18173-18193, 18175-18194, 18176-18195, 18180-18199, 18308-18327, 18310-18329, 18311-18330, 18312-18331, 18321-18340, 18323-18342, 18324-18343, 18325-18344, 18326-18345, 18327-18346, 18328-18347, 18331-18350, 18379-18436, 18432-18451, 18450-18469, 18581-18600, 18585-18604, 18828-18847, 18829-18848, 18900-18919, 19911-19930, 20300-20321, 20668-20687, 20830-20849, 20837-20857, 20958-20977, 22444-22463, 22548-22567, 22771-22790, 22772-22791, 22773-22792, 22886-22905, 23096-23115, 23100-23119, 23239-23258, 23242-23261, 23243-23262, 23244-23263, 23245-23264, 23246-23262, 23427-23446, 23551-23570, 23552-23571, 23557-23576, 24123-24142, 24878-24897, 25023-25042, 25028-25047, 25033-25088, 25073-25092, 25075-25094, 25078-25101, 25085-25104, 25183-25202, 25193-25212, 25246-25291, 25375-25394, 25380-25399, 25782-25804, 25787-25806, 25841-25860, 25846-25865, 25900-25919, 25905-25928, 25911-25930, 25915-25934, 25950-25970, 26005-26025, 26010-26029, 26162-26185, 26169-26191, 26174-26194, 26179-26219, 26300-26319, 26302-26321, 26304-26324, 26353-26372, 26358-26377, 26482-26501, 26517-26536, 26519-26538, 26520-26539, 26521-26540, 26536-26550, 26537-26556, 26538-26557, 26615-26634, 26620-26639, 26627-26646, 26629-26648, 26630-26649, 26631-26650, 26632-26651, 26635-26654, 26640-26659, 26711-26730, 26778-26798, 26788-26807, 26811-26830, 26884-26903, 27050-27070, 27053-27072, 27055-27075, 27221-27240, 27231-27250, 27236-27256, 27241-27260, 27382-27401, 27383-27402, 27387-27406, 27770-27789, 27775-27794, 27777-27796, 27779-27799, 27782-27804, 27787-27809, 27853-27877, 28026-28046, 28029-28048, 28128-28149, 28133-28152, 28463-28482, 28468-28488, 28476-28497, 28480-28500, 29011-29030, 29143-29163, 29160-29179, 29193-29212, 29245-29265, 26253-26272, 29369-29388, 29548-29589, 29678-29697, 29683-29702, 29782-29801, 29827-29847, 29829-29848, 29830-29849, 29838-29858, 29840-29859, 29841-29860, 29842-29861, 29844-29863, 29854-29873, 30483-30502, 30484-30503, 30529-30548, 30674-30693, 30982-31001, 31554-31573, 32131-32151, 32135-32154, 32182-32201, 32431-32450, 32432-32451, 32433-32452, 32434-32453, 32446-32466, 32448-32467, 32449-32468, 32450-32469, 32451-32470, 32452-32471, 32453-32472, 32454-32473, 32455-32474, 32456-32475, 32459-32479, 32461-32480, 32462-32481, 32463-32482, 32464-32483, 32465-32484, 32466-32485, 32467-32486, 32468-32487, 32469-32488, 32470-32489, 32476-32495, 32477-32496, 32480-32499, 32619-32638, 32620-32639, 32621-32640, 32623-32642, 32645-32664, 32752-32771, 32753-32772, 32757-32776, 32816-32835, 33179-33199, 33181-33200, 33182-33201, 33412-33433, 33729-33749, 33866-33885, 34211-34231, 34739-34758, 34931-34950, 35436-35456, 35666-35685, 36247-36266, 36249-36268, 36250-36269, 36251-36270, 36252-36271, 36253-36272, 36258-36277, 36354-36373, 36409-36428, 36512-36531, 36517-36536, 36583-36602, 36680-36699, 36681-36700, 36841-36860, 36846-36865, 39670-39689, and 39832-39851.

[0134] In certain embodiments, the following nucleotide regions of SEQ ID NO: 2, when targeted by antisense compounds or oligonucleotides, display at least 90% inhibition: 32447-32466, 32452-32471, 32460-32479, 32462-32481, 32464-32483, 32465-32484, 32466-32485, 32467-32486, 32468-32487, 32619-32638, 32620-32639, 32753-32772, 36250-36269, 36517-36536, 32432-32451, 32431-32450, 30483-30502, 29828-29847, 29011-29030, 28026-28045, 29011-29030, 29828-29847, 30483-30502, 32431-32450, 32432-32451, 32447-32466, 32452-32471, 32460-32479, 32462-32481, 32464-32483, 32465-32484, 32466-32485, 32467-32486, 32468-32487, 32619-32638, 32620-32639, 32753-32772, 36250-36269, 36252-36271, 36409-36428, and 36517-36536.

[0135] In certain embodiments, the following antisense compounds or antisense oligonucleotides target a region of a DGAT2 nucleic acid and effect at least a 60% inhibition of a DGAT2 mRNA, ISIS NOs: 413236, 413284, 413391, 413399, 413413, 413422, 413433, 413433, 413441, 413446, 423460-423466, 423520-423527, 423601-423604, 472182, 472188, 472189, 472194-472196, 472203-472206, 472208, 472347, 472349-472352, 472398, 483803, 483811-483814, 483816-483818, 483821-483823, 483825-483835, 483838-483842, 483846-483848, 483852, 483853, 483862, 483866, 483868-483875, 483879, 483886-483890, 483892, 483895, 483897-483903, 483906-483913, 483916-483929, 483932-483934, 483936, 483942, 483948-483950, 483952, 483954, 483956, 483961, 483968-483973, 483975-483979, 483981, 483983-483989, 483992-483997, 484001, 484002, 484004-484006, 484008-484013, 484015-484017, 484019, 484020, 484028, 484030, 484031, 484041, 484049, 484050, 484054-484057, 484063-484065, 484069-484073, 484081-484083, 484085, 484089, 484094, 484097-484107, 484110, 484111, 484114-484119, 484123, 484125-484127, 484129-484137, 484139-484142, 484145-484149, 484152, 484154, 484156-484159, 484161, 484162, 484164, 484165, 484167-484172, 484178-484182, 484184, 484185, 484188, 484190-484198, 484202-484204, 484209-484211, 484213, 484215, 484217-484221, 484227, 484231, 484232, 484234, 484235, 484237, 484240-484243, 484248-484250, 484257, 484263, 484265-484271, 484273-484276, 484281-484285, 484290, 484292, 484293, 484298, 484299, 484301, 484302, 484310, 484319-484325, 484327, 484336, 484338, 484342-484344, 484346-484357, 484359, 484362-484365, 484368, 484370-484387, 484390, 484404, 484411, 495425, 495428, 495429, 495430, 495436, 495438, 495440-495459, 495461-495473, 495475, 495476, 495479-495492, 495495-495511, 495514-495545, 495548-495580, 495584, 495585, 495587-495594, 495596-495626, 495630-495639, 495641-495644, 495648-495651, 495656, 495657, 495660-495662, 495664-495667, 495669-495671, 495676, 495677, 495684-495689, 495692-495707, 495711, 495713, 495714, 495717-495732, 495734, 495736-495739, 495742-495757, 495762-495766, 495772-495774, 495781-495786, 495788, 495789, 495791, 495793-495797, 495799, 495800, 495804, 495808-495813, 495817-495844, 495847-495860, 495862-495870, 495873-495883, 495886, 495899-495904, 495909, 495911-495914, 495918, 495920-495923, 495955, 495957, 495958, 495983, 495992, 496004, 496009, 496010, 496012, 496033, 500841, 500843, 500844, 500852, 500859, 500866, 500867, 500870, 500871, 500892, 500895, 500912, 500913, 500928, 500929, 500934, 500935, 500942, 500944-500946, 500950, 500953, 500957, 500960, 500961, 500966, 500974, 500975, 500979, 500982, 500985, 500986, 500989, 500990, 500994, 500995, 500997, 500998, 501004, 501007, 501008, 501016, 501018-501020, 501025, 501026, 501029-501031, 501033-501035, 501037-501041, 501043, 501055, 501061, 501062, 501064, 501067-501070, 501076, 501093-501098, 501100, 501103, 501104, 501106, 501108, 501111, 501117-501119, 501122-501130, 501140, 501154, 501155, 501158, 501165, 501171, 501176, 501177, 501182-501184, 501193, 501194, 501199, 501200, 501209, 501210, 501212-501214, 501217, 501224, 501227-501230, 501240, 501241, 501244, 501247-501249, 501254, 501256, 501264, 501270, 501287, 501289, 501290, 501297, 501319, 501322, 501326, 501332, 501335, 501342, 501345, 501353, 501357, 501370, 501382-501406, 501410-501412, 501414, 501426-501431, 501434-501443, 501445-501457, 501831, 501835, 501837, 501838, 501849-501853, 501855, 501861, 501867, 501871, 501880, 501883, 501884, 501886-501890, 501900, 501903, 501916, 501932-501934, 501944, 501946, 501947, 501950, 501951, 501957, 501959, 501960, 501966, 501968, 501976, 501977, 501979, 501981-501983, 501991, 501996, 502011, 502013-502015, 502019, 502024-502028, 502031, 502034, 502036-502042, 502045, 502046, 502050, 502053, 502055, 502056, 502062, 502065, 502068-502070, 502083-502085, 502095-502100, 502102, 502106, 502110, 502113, 502114, 502117, 502119, 502120, 502122, 502124, 502127, 502131, 502135, 502144, 502146, 502149, 502150, 502154-502156, 502158, 502163, 502164, 502167, 502172-502176, 502179, 502186, 502189, 502191, 502192, 502194, 502204, 502206, 502215, 502220, 502223, 502228, 502236, 502314, 502319, 502320, 502322, 502334, 502336, 507663, 507665, 507667, 507669, 507675, 507677, 507679, 507684, 507689-507696, 507705, 507709-507719, 507724, 507726, 522363, 522365, 522366, 522368-522375, 522383-522386, 522389, 522391, 522395, 522396, 522398-522413, 522416-522422, 522424-522440, 522442-522452, 522454, 522456, 522457, 522461-522467, 522469-522474, 522478-522490, 522492-522513, 522516-522518, 522521, 522522, 522525, 522529, 522530, 522533-522535, 522540-522550, 522552-522558, 522561-522565, 522573, 522577-522582, 522586-522593, 522597, 522598, 522602-522614, 522617-522625, 522627-522639, 522642-522645, 522657-522663, 522666-522668, 522671-522684, 522686-522702, 522704-522728, 522732, 522733, 522738-522740, 522744-522749, 522754, 522757-522761, 522763-522771, 522776-522778, 522780, 522782-522785, 522788-522797, 522801-522803, 522805, 522807-522809, 522813, 522821-522824, 522829-522831, 522835-522839, 522842, 522844, 522846-522850, 522852-522854, 522856, 522857, 522865-522873, 522875-522880, 522887-522897-522899, 522901, 522904-522906, 522909, 522913, 522914, 522917, 522924, 522925, 522927, 522931-522935, 522939-522943, 522945-522950, 522956, 522964, 522965, 522970, 522977-522982, 522986, 522987, 522996, 522997, 523000-523002, 523015, 523016, 523022, 523025-523027, 525388, 525391, 525394, 525395, 525399, 525401-525405, 525414-525416, 525419, 525420, 525423, 525424, 525431, 525434-525436, 525441-525444, 525450, 525461, 525468-525474, 525477, 525479, 525480, 525484, 525485, 525488-525491, 525498-525501, 525504-525507, 525511-525518, 525520, 525528, 525535-525537, 525539, 525541, 525542, 525544, 525547-525558, 525565, 525577-525579, 525606, 525609-525612, 525619, 525631, 525632, 525649, 525650, 525658, 525683, 525687, 525688, 525690, 525705-525711, 525733, 525737, 525740, 525741, and 525754.

[0136] In certain embodiments, the following antisense compounds or antisense oligonucleotides target a region of a DGAT2 nucleic acid and effect at least a 60% inhibition of a DGAT2 mRNA, SEQ ID NOs: 20, 38, 39, 41, 46-48, 61-64, 68, 69, 74, 75, 76, 103, 120, 121, 122, 131, 134, 144, 145, 150, 152, 153, 154, 181, 182, 183, 202-204, 221, 225, 226, 229, 236, 237, 246, 247, 251, 259, 262, 272, 277-280, 283, 383, 391, 405, 414, 425, 433, 438, 450, 452, 453, 455-479, 482-496, 504-507, 509-511, 514-516, 518-528, 531-535, 539-541, 545, 546, 555, 559, 561-568, 574, 575, 577, 578, 583, 584, 589, 594-596, 597, 601, 607, 608, 613-615, 622-625, 627, 652, 653, 660, 674, 706, 709-711, 718-720, 726, 738, 740-745, 749-752, 754-756, 758-769, 774, 789, 793, 794, 807-812, 815, 819, 820, 839, 841-846, 848-852, 878-880, 884, 885, 889, 890, 892-895, 897, 899, 900, 902, 904, 907, 910, 913-916, 923, 935-940, 960-964, 968, 972-977, 979-981, 983-985, 988, 991-1010, 1014, 1015, 1017, 1018, 1020, 1023-1025, 1032-1034, 1036-1038, 1040, 1043-1049, 1051-1054, 1057-1061, 1065, 1071-1073, 1078-1080, 1083, 1084, 1092-1098, 1103, 1107, 1108, 1117, 1118, 1136, 1141, 1142, 1148, 1149, 1153, 1155, 1159, 1165, 1172-1176, 1178, 1181, 1183-1189, 1192-1199, 1202-1215, 1218-1220, 1222, 1228, 1234-1236, 1238, 1240, 1242, 1247, 1254-1259, 1261-1265, 1267, 1269-1275, 1278-1283, 1287, 1288, 1290-1292, 1294-1299, 1301-1303, 1305, 1306, 1314, 1316, 1317, 1327, 1335, 1336, 1340-1343, 1349-1351, 1355-1359, 1367-1369, 1371, 1375, 1380, 1383-1393, 1396, 1397, 1400-1405, 1409, 1411-1413, 1415-1423, 1425-1428, 1431-1435, 1438, 1440, 1442-1445, 1447, 1448, 1450, 1451, 1453-1458, 1464-1468, 1470, 1471, 1474, 1476-1484, 1488-1490, 1495-1497, 1499, 1501, 1503-1507, 1513, 1517, 1518, 1520, 1521, 1523, 1526-1529, 1534-1536, 1543, 1549, 1551-1557, 1559-1562, 1567-1571, 1576, 1578, 1579, 1584, 1585, 1587, 1588, 1596, 1605-1611, 1613, 1622, 1624, 1628-1630, 1632-1643, 1645, 1648-1651, 1654, 1656-1673, 1676, 1677, 1690, 1697, 1698, 1701-1703, 1709, 1711, 1713-1746, 1748, 1749, 1752-1765, 1768-1784, 1787-1818, 1821-1853, 1857, 1858, 1860-1867, 1869-1899, 1903-1912, 1914-1917, 1921-1924, 1929, 1930, 1933-1935, 1937-1940, 1942-1944, 1949, 1950, 1957-1962, 1965-1980, 1984, 1986, 1987, 1990-2005, 2007, 2009-2012, 2015-2030, 2035-2039, 2045-2047, 2054-2059, 2061, 2062, 2064, 2066-2070, 2072, 2073, 2077, 2081-2086, 2090-2117, 2120-2133, 2135-2143, 2146-2156, 2159, 2172-2177, 2182, 2184-2187, 2191, 2193-2196, 2228, 2230, 2231, 2256, 2265, 2277, 2282, 2283, 2285, 2306, 2308, 2310-2334, 2338-2340, 2342, 2350, 2351, 2354-2359, 2362-2371, 2373-2385, 2402, 2405, 2409, 2415, 2418, 2425, 2428, 2436, 2440, 2453, 2465-2468, 2478, 2479, 2482, 2485-2487, 2492, 2494, 2502, 2508, 2525, 2527, 2528, 2535, 2543, 2544, 2547, 2554, 2560, 2565, 2566, 2571-2573, 2582, 2583, 2588, 2589, 2598, 2599, 2601-2603, 2606, 2613, 2615, 2632-2637, 2639, 2642, 2643, 2645, 2647, 2650, 2656-2658, 2661-2669, 2679, 2691, 2692, 2694, 2695, 2701, 2704, 2705, 2713, 2715-2717, 2722, 2723, 2726, 2727, 2728, 2730-2732, 2734-2739, 2748, 2754, 2755, 2757, 2760-2763, 2779, 2780, 2785, 2786, 2793, 2795-2797, 2801, 2804, 2808, 2811, 2812, 2817, 2825, 2826, 2830, 2833, 2836, 2837, 2840, 2841, 2846, 2848, 2849, 2857, 2864, 2871, 2872, 2875, 2876, 2897, 2900, 2917, 2918, 2929, 2933, 2935, 2936-2951, 2953, 2959, 2965, 2969, 2978, 2981, 2982, 2984-2988, 2998, 3001, 3014, 3030-3032, 3042, 3044, 3045, 3048, 3049, 3055, 3057, 3058, 3064, 3066, 3074, 3075, 3077, 3079, 3080, 3081, 3089, 3094, 3109, 3111-3113, 3117, 3122-3126, 3129, 3132, 3134-3140, 3143, 3144, 3148, 3151, 3153, 3154, 3160, 3163, 3166-3168, 3172-3174, 3181-3183, 3193-3198, 3200, 3204, 3208, 3211, 3212, 3215, 3217, 3218, 3220, 3222, 3225, 3229, 3233, 3242, 3244, 3247, 3248, 3252-3254, 3256, 3261, 3262, 3265, 3270-3274, 3277, 3284, 3287, 3289, 3290, 3292, 3302, 3304, 3313, 3318, 3321, 3326, 3334, 3388, 3390, 3392, 3393, 3396, 3398, 3404, 3408, 3410, 3412, 3417, 3418, 3420, 3422-3429, 3432, 3434, 3438, 3442-3452, 3464, 3466, 3468, 3470, 3471, 3473-3480, 3488-3491, 3494, 3496, 3500, 3501, 3503-3518, 3521-3527, 3529-3545, 3547-3557, 3559, 3561, 3562, 3566-3572, 3574-3579, 3583-3595, 3597-3618, 3621-3623, 3626, 3627, 3630, 3634, 3635, 3638-3640, 3645-3655, 3657-3663, 3666-3670, 3678, 3682-3687, 3691-3698, 3702, 3703, 3707-3719, 3722-3730, 3732-3744, 3747-3750, 3762-3768, 3771-3773, 3776-3789, 3791-3807, 3809-3833, 3837, 3838, 3843-3845, 3849-3854, 3859, 3862-3866, 3868-3876, 3881-3883, 3885, 3887-3890, 3893-3902, 3906-3908, 3910, 3912-3914, 3918, 3926-3929, 3934-3936, 3940-3944, 3947, 3949, 3951-3955, 3957-3959, 3961, 3962, 3970-3978, 3980-3985, 3992-3995, 3997-4000, 4002-4004, 4006, 4009-4011, 4014, 4018, 4019, 4022, 4029, 4030, 4032, 4036-4040, 4044-4048, 4050-4055, 4061, 4069, 4070, 4075, 4082, 4083, 4085, 4086, 4092, 4095-4097, 4105-4109, 4113, 4114, 4123, 4124, 4127-4129, 4143, 4146, 4149, 4150, 4154, 4156-4160, 4169-4171, 4174, 4175, 4178, 4179, 4186, 4189-4191, 4196-4199, 4205, 4222, 4229-4235, 4238, 4240, 4241, 4245, 4246, 4249-4252, 4259-4262, 4265-4268, 4272-4279, 4281, 4289, 4296-4298, 4300, 4302, 4303, 4305, 4308-4319, 4326, 4338-4340, 4364, 4367, 4368, 4372, 4373, 4380, 4392, 4393, 4410, 4411, 4419, 4444, 4448, 4449, 4451, 4466-4472, 4494, 4498, 4501, 4502, 4515, 4526-4530, 4532-4535, 4537, 4538-4541, 4544-4546, 4556-4573, 4575-4578, 4580-4583, 4588, 4589, 4592-4594, 4596, 4597, 4599-4601, 4604, 4605, 4612-4614, 4616, 4620, 4622-4625, 4634-4636, 4644, 4652, 4655, 4656, 4667-4670, and 4672.

[0137] In certain embodiments, the following antisense compounds or antisense oligonucleotides target a region of a DGAT2 nucleic acid and effect at least a 70% inhibition of a DGAT2 mRNA, ISIS NOs: 413236, 413433, 413446, 423437, 423440-423445, 423447, 423449, 423450, 423452-423454, 423460-423465, 423522-423528, 423601-423604, 472204, 472205, 472208, 472349-472351, 483803, 483811-483814, 483816-483818, 483825, 483826, 483828-483835, 483838-483842, 483846, 483848, 483852, 483862, 483866, 483869, 483870, 483872-483875, 483879, 483887-483890, 483892, 483895, 483897-483903, 483908-483913, 483916-483921, 483923, 483924, 483926-483928, 483934, 483948-483950, 483952, 483954, 483968-483970, 483972, 483973, 483975, 483977-483979, 483984-483989, 483992-483994, 483996, 483997, 484001, 484004, 484006, 484010, 484012, 484017, 484019, 484020, 484030, 484031, 484041, 484049, 484056, 484064, 484069, 484070, 484071, 484073, 484082, 484083, 484085, 484089, 484094, 484099-484102, 484104, 484105, 484107, 484110, 484111, 484114-484118, 484126, 484127, 484129-484131, 484133, 484135-484137, 484139-484142, 484145-484148, 484156-484158, 484161, 484167, 484169-484172, 484178, 484180-484182, 484185, 484190, 484192-484194, 484198, 484202-484204, 484209, 484211, 484215, 484217-484220, 484231, 484232, 484235, 484241, 484248, 484249, 484263, 484265, 484267-484271, 484273, 484274, 484276, 484283-484285, 484290, 484292, 484293, 484301, 484302, 484320-484322, 484324, 484327, 484336, 484342-484344, 484346, 484348-484350, 484352, 484353, 484355-484357, 484359, 484368, 484370-484378, 484381-484383, 484390, 495425, 495429, 495430, 495440-495443, 495445-495454, 495456, 495458, 495461-495473, 495476, 495479-495485, 495487-495492, 495495-495499, 495501-495511, 495514-495531, 495533-495545, 495548-495556, 495558, 495560-495566, 495568-495580, 495584, 495585, 495588-495592, 495597-495600, 495602-495610, 495612-495614, 495616-495626, 495631-495633, 495636-495639, 495641-495643, 495649, 495650, 495656, 495657, 495661, 495664, 495666, 495669-495671, 495677, 495685, 495686, 495694, 495695, 495697, 495699-495702, 495705-495707, 495711, 495714, 495718-495720, 495724, 495730, 495731, 495736-495739, 495743-495746, 495748-495754, 495756, 495757, 495762, 495763, 495766, 495772, 495782, 495784, 495785, 495789, 495794, 495795, 495800, 495804, 495808-495813, 495817-495822, 495825-495833, 495835-495837, 495838-495844, 495848-495850, 495852-495857, 495859, 495860, 495867-495869, 495873-495878, 495882, 495899-495902, 495904, 495911, 495912, 495955, 495957, 495958, 495992, 500841, 500844, 500852, 500859, 500867, 500892, 500913, 500928, 500942, 500950, 500953, 500966, 500975, 500986, 500989, 500990, 500994, 500998, 501018-501020, 501025, 501030, 501033-501035, 501038-501041, 501062, 501064, 501067, 501069, 501093, 501094, 501097, 501098, 501100, 501103, 501111, 501118, 501122, 501123, 501127, 501128, 501154, 501165, 501171, 501176, 501183, 501184, 501199, 501200, 501210, 501212-501214, 501224, 501240, 501249, 501270, 501287, 501382-501385, 501387-501396, 501398-501402, 501404-501406, 501410-501412, 501414, 501426-501430, 501435, 501436, 501438-501443, 501445, 501447-501452, 501454-501457, 501849, 501850, 501852, 501855, 501861, 501871, 501883, 501884, 501886, 501890, 501916, 501932, 501944, 501946, 501950, 501951, 501959, 501960, 501966, 501968, 501981-501983, 502013, 502015, 502025, 502026, 502037, 502040, 502045, 502046, 502056, 502083, 502098, 502099, 502106, 502110, 502119, 502120, 502131, 502135, 502154-502156, 502163, 502164, 502175, 502179, 502189, 502191, 502194, 502220, 502319, 502322, 502334, 507663, 507679, 507684, 507692-507696, 507710, 507716-507718, 507724, 522363, 522366, 522368, 522370, 522373-522375, 522383-522385, 522399, 522404-522406, 522408, 522409, 522411, 522418, 522421, 522422, 522424, 522427, 522428, 522434-522437, 522440, 522442, 522444-522446, 522450, 522452, 522457, 522462-522467, 522470, 522473, 522474, 522478, 522479, 522482, 522484-522490, 522492, 522494-522496, 522501, 522503-522505, 522509, 522510, 522518, 522529, 522534, 522540, 522542-522550, 522552-522556, 522561, 522562, 522565, 522578-522582, 522587-522592, 522602-522610, 522612-522614, 522618, 522619, 522621, 522622, 522625, 522627, 522630-522638, 522642-522645, 522657, 522658, 522661-522663, 522666, 522667, 522671-522683, 522687-522694, 522696-522702, 522705, 522706, 522709, 522710, 522714-522719, 522722-522728, 522740, 522745-522748, 522754, 522757-522759, 522761, 522766-522771, 522776-522778, 522780, 522783, 522784, 522789, 522791, 522793, 522794, 522797, 522801, 522802, 522807, 522821, 522831, 522838, 522842, 522844, 522853, 522857, 522865, 522866, 522869-522872, 522877, 522878, 522888, 522889, 522894, 522897, 522898, 522905, 522913, 522917, 522924, 522925, 522932, 522939, 522940-522943, 522947, 522950, 522964, 522965, 522996, 523000, 523002, 523026, 525395, 525401, 525402, 525415, 525431, 525442, 525443, 525468-525472, 525474, 525477, 525479, 525480, 525499-525501, 525505, 525506, 525512, 525513, 525515, 525536, 525544, 525551-525554, 525578, 525612, 525631, 525688, 525705, 525708, 525711, 525733, and 525754.

[0138] In certain embodiments, the following antisense compounds or antisense oligonucleotides target a region of a DGAT2 nucleic acid and effect at least a 70% inhibition of a DGAT2 mRNA, SEQ ID NOs: 20, 38, 39, 46, 47, 62, 63, 103, 120, 121, 131, 144, 145, 150, 152, 153, 154, 182, 183, 202, 203, 204, 221, 225, 229, 246, 259, 283, 425, 438, 452, 453, 455-458, 460, 462-477, 479, 482-485, 487-496, 504-507, 509-511, 518, 519, 521-528, 531-535, 539, 541, 545, 555, 559, 562, 563, 565-568, 574, 575, 577, 594, 595, 597, 623, 624, 627, 653, 706, 710, 740, 742-744, 749-752, 754-756, 758, 760-766, 768, 769, 789, 808-811, 841-843, 845, 846, 848, 850-852, 880, 890, 893, 895, 897, 914-916, 939, 940, 960, 961, 973, 974, 981, 991-997, 1000, 1001, 1003-1008, 1015, 1020, 1024, 1032, 1034, 1036, 1043-1045, 1047-1049, 1052, 1059-1061, 1079, 1080, 1083, 1084, 1092, 1093, 1096, 1098, 1155, 1165, 1173-1176, 1178, 1181, 1183-1189, 1194-1199, 1202-1207, 1209, 1210, 1212-1214, 1220, 1234-1236, 1238, 1240, 1254-1256, 1258, 1259, 1261, 1263-1265, 1270-1275, 1278-1280, 1282, 1283, 1287, 1290, 1292, 1296, 1298, 1303, 1305, 1306, 1316, 1317, 1327, 1335, 1342, 1350, 1355-1357, 1359, 1368, 1369, 1371, 1375, 1380, 1385-1388, 1390, 1391, 1393, 1396, 1397, 1400-1404, 1412, 1413, 1415-1417, 1419, 1421-1423, 1425-1428, 1431-1434, 1442-1444, 1447, 1453, 1455-1458, 1464, 1466-1468, 1471, 1476, 1478-1480, 1484, 1488-1490, 1495, 1497, 1501, 1503-1506, 1517, 1518, 1521, 1527, 1534, 1535, 1549, 1551, 1553-1557, 1559, 1560, 1562, 1569-1571, 1576, 1578, 1579, 1587, 1588, 1606-1608, 1610, 1613, 1622, 1628-1630, 1632, 1634-1636, 1638, 1639, 1641-1643, 1645, 1654, 1656-1664, 1667-1669, 1676, 1677, 1698, 1702, 1703, 1713-1716, 1718-1727, 1729, 1731, 1734-1746, 1749, 1752-1758, 1760-1765, 1768-1772, 1774-1784, 1787-1804, 1806-1818, 1821-1829, 1831, 1833-1839, 1841-1853, 1857, 1858, 1861-1865, 1870-1873, 1875-1883, 1885-1887, 1889-1899, 1904-1906, 1909-1912, 1914-1916, 1922, 1923, 1929, 1930, 1934, 1937, 1939, 1942-1944, 1950, 1958, 1959, 1967, 1968, 1970, 1972-1975, 1978-1980, 1984, 1987, 1991-1993, 1997, 2003, 2004, 2009-2012, 2016-2019, 2021-2027, 2029, 2030, 2035, 2036, 2039, 2045, 2055, 2057, 2058, 2062, 2067, 2068, 2073, 2077, 2081-2086, 2090-2095, 2098-2106, 2108-2117, 2121-2123, 2125-2130, 2132, 2133, 2140-2142, 2146-2151, 2155, 2172-2175, 2177, 2184, 2185, 2228, 2230, 2231, 2265, 2308, 2310-2313, 2315-2324, 2326-2330, 2332-2334, 2338-2340, 2342, 2350, 2351, 2354-2358, 2363, 2364, 2366-2371, 2373, 2375-2380, 2382-2385, 2478, 2487, 2508, 2525, 2543, 2554, 2560, 2565, 2572, 2573, 2588, 2589, 2599, 2601-2603, 2613, 2632, 2633, 2636, 2637, 2639, 2642, 2650, 2657, 2661, 2662, 2666, 2667, 2691, 2695, 2715-2717, 2722, 2727, 2730-2732, 2735-2738, 2755, 2757, 2760, 2762, 2779, 2793, 2801, 2804, 2817, 2826, 2837, 2840, 2841, 2846, 2849, 2857, 2864, 2872, 2897, 2918, 2947, 2948, 2950, 2953, 2959, 2969, 2981, 2982, 2984, 2988, 3014, 3030, 3042, 3044, 3048, 3049, 3057, 3058, 3064, 3066, 3079-3081, 3111, 3113, 3123, 3124, 3135, 3138, 3143, 3144, 3154, 3173, 3181, 3196, 3197, 3204, 3208, 3217, 3218, 3229, 3233, 3252-3254, 3261, 3262, 3273, 3277, 3287, 3289, 3292, 3318, 3388, 3393, 3404, 3412, 3417, 3420, 3425-3429, 3432, 3443, 3449-3451, 3464, 3468, 3471, 3473, 3475, 3478-3480, 3488-3490, 3504, 3509-3511, 3513-3516, 3523, 3526, 3527, 3529, 3532, 3533, 3539-3542, 3545, 3547, 3549-3551, 3555, 3557, 3562, 3567-3572, 3575, 3578, 3579, 3583, 3584, 3587, 3589-3595, 3597, 3599-3601, 3606, 3608-3610, 3614, 3615, 3623, 3634, 3639, 3645, 3647-3655, 3657-3661, 3666, 3667, 3670, 3683-3687, 3692-3697, 3707-3715, 3717-3719, 3723, 3724, 3726, 3727, 3730, 3732, 3735-3743, 3747-3750, 3762, 3763, 3766-3768, 3771, 3772, 3776-3788, 3792-3799, 3801-3807, 3810, 3811, 3814, 3815, 3819-3824, 3827-3833, 3845, 3850-3853, 3859, 3862-3864, 3866, 3871-3876, 3881-3883, 3885, 3888, 3889, 3894, 3896, 3898, 3899, 3902, 3906, 3907, 3912, 3926, 3936, 3943, 3947, 3949, 3958, 3962, 3970, 3971, 3974-3977, 3982, 3983, 3993, 3994, 3999, 4002, 4003, 4010, 4018, 4022, 4029, 4030, 4037, 4044-4048, 4052, 4055, 4069, 4070, 4096, 4123, 4127, 4129, 4150, 4156, 4157, 4170, 4186, 4197, 4198, 4229-4233, 4235, 4238, 4240, 4241, 4260-4262, 4266, 4267, 4273, 4274, 4276, 4297, 4305, 4312-4315, 4339, 4373, 4392, 4449, 4466, 4469, 4472, 4494, 4515, 4526-4530, 4532, 4533, 4535, 4537-4540, 4545, 4546, 4558-4560, 4562-4570, 4573, 4575, 4576, 4578, 4580, 4582, 4588, 4589, 4592, 4596, 4600, 4601, 4604, 4612-4614, 4616, 4622-4625, 4634, 4635, 4652, 4667, and 4668.

[0139] In certain embodiments, the following antisense compounds or antisense oligonucleotides target a region of a DGAT2 nucleic acid and effect at least an 80% inhibition of a DGAT2 mRNA, ISIS NOs: 413433, 423463, 423464, 423523, 423524, 423526, 472351, 483817, 483825, 483826, 483828, 483830-483835, 483839-483841, 483848, 483852, 483866, 483869, 483870, 483873-483875, 483887, 483889, 483890, 483895, 483897, 483898, 483900, 483901, 483908-483910, 483913, 483916, 483919, 483921, 483923, 483924, 483927, 483952, 483968-483970, 483972, 483984, 483986-483988, 483992, 483993, 483996, 483997, 484004, 484017, 484031, 484041, 484049, 484064, 484070, 484085, 484094, 484099, 484100, 484115-484117, 484126, 484127, 484129-484131, 484133, 484137, 484139-484141, 484148, 484156-484158, 484167, 484169-484171, 484181, 484182, 484192, 484193, 484203, 484204, 484209, 484215, 484217, 484218, 484220, 484231, 484235, 484249, 484267-484271, 484273, 484283, 484284, 484292, 484293, 484301, 484327, 484336, 484343, 484344, 484348, 484350, 484353, 484357, 484368, 484377, 484378, 495425, 495429, 495440, 495442, 495446, 495449-495451, 495453, 495454, 495463, 495464, 495466, 495467, 495469-495472, 495481, 495482, 495484, 495485, 495488-495492, 495495-495498, 495505-495510, 495514-495531, 495533-495537, 495539-495541, 495543-495545, 495550-495556, 495560, 495561-495564, 495566, 495568-495578, 495585, 495591, 495598-495600, 495604, 495606, 495608, 495609, 495618-495622, 495639, 495649, 495650, 495685, 495686, 495697, 495702, 495705-495707, 495718, 495730, 495736, 495738, 495739, 495744, 495745, 495749, 495751-495753, 495756, 495785, 495808-495810, 495817-495820, 495822, 495825-495832, 495835-495844, 495849, 495852-495854, 495856, 495857, 495867-495869, 495874-495878, 495902, 495992, 500859, 500867, 500913, 500998, 501020, 501034, 501035, 501064, 501094, 501098, 501100, 501103, 501127, 501183, 501199, 501213, 501385, 501387-501393, 501396, 501398, 501404-501406, 501411, 501412, 501427-501430, 501435, 501436, 501438, 501440, 501442, 501443, 501447-501452, 501454-501855, 501861, 501884, 501944, 501950, 501983, 502040, 502046, 502056, 502083, 502099, 502119, 502154, 502164, 502175, 502179, 502189, 502191, 502319, 507692, 507694, 507696, 507717, 522366, 522373-522375, 522383, 522435-522437, 522444, 522445, 522450, 522465, 522473, 522484, 522485, 522495, 522501, 522509, 522529, 522546, 522550, 522553-522556, 522579-522582, 522587-522589, 522606-522610, 522618, 522621, 522627, 522630-522632, 522634, 522638, 522643, 522645, 522667, 522671, 522672, 522674-522683, 522687-522692, 522694, 522696-522700, 522705, 522709, 522715-522719, 522745, 522757, 522770, 522783, 522784, 522807, 522865, 522866, 522888, 522889, 522897, 522913, 522942, 522964, 523002, 525401, 525469, 525470, 525501, and 525612.

[0140] In certain embodiments, the following antisense compounds or antisense oligonucleotides target a region of a DGAT2 nucleic acid and effect at least a 80% inhibition of a DGAT2 mRNA, SEQ ID NOs: 103, 120, 121, 131, 144, 145, 150, 152, 153, 182, 204, 246, 259, 283, 425, 456, 457, 462, 463, 467-469, 487-490, 504, 506, 509, 510, 518, 519, 521, 523, 524-528, 532-534, 541, 545, 559, 562, 563, 566-568, 594, 742, 750, 751, 762, 808-810, 843, 845, 893, 915, 939, 973, 993-995, 997, 1000, 1001, 1005, 1006, 1008, 1034, 1060, 1061, 1079, 1084, 1173, 1175, 1176, 1181, 1183, 1184, 1186, 1187, 1194-1196, 1199, 1202, 1205, 1207, 1209, 1210, 1213, 1238, 1254-1256, 1258, 1270, 1272-1274, 1278, 1279, 1282, 1283, 1290, 1303, 1317, 1327, 1335, 1350, 1356, 1371, 1380, 1385, 1386, 1401-1403, 1412, 1413, 1415-1417, 1419, 1423, 1425-1427, 1434, 1442-1444, 1453, 1455-1457, 1467, 1468, 1478, 1479, 1489, 1490, 1495, 1501, 1503, 1504, 1506, 1517, 1521, 1535, 1553-1557, 1559, 1569, 1570, 1578, 1579, 1587, 1613, 1622, 1629, 1630, 1634, 1636, 1639, 1643, 1654, 1663, 1664, 1677, 1698, 1702, 1713, 1715, 1719, 1722-1724, 1726, 1727, 1736, 1737, 1739, 1740, 1742-1745, 1754, 1755, 1757, 1758, 1761-1765, 1768-1771, 1778-1783, 1787-1804, 1806-1810, 1812-1814, 1816-1818, 1823-1829, 1833-1837, 1839, 1841-1851, 1858, 1864, 1871-1873, 1877, 1879, 1881, 1882, 1891-1895, 1912, 1922, 1923, 1958, 1959, 1970, 1975, 1978-1980, 1991, 2003, 2009, 2011, 2012, 2017, 2018, 2022, 2024-2026, 2029, 2058, 2081-2083, 2090-2093, 2095, 2098-2105, 2108-2117, 2122, 2125-2127, 2129, 2130, 2140-2142, 2147-2151, 2175, 2265, 2313, 2315-2321, 2324, 2326, 2332-2334, 2339, 2340, 2355-2358, 2363, 2364, 2366, 2368, 2370, 2371, 2375-2380, 2382, 2383, 2572, 2588, 2602, 2633, 2637, 2639, 2642, 2666, 2695, 2717, 2731, 2732, 2757, 2864, 2872, 2918, 2953, 2959, 2982, 3042, 3048, 3081, 3138, 3144, 3154, 3181, 3197, 3217, 3252, 3262, 3273, 3277, 3287, 3289, 3404, 3417, 3425, 3427, 3429, 3450, 3471, 3478-3480, 3488, 3540-3542, 3549, 3550, 3555, 3570, 3578, 3589, 3590, 3600, 3606, 3614, 3634, 3651, 3655, 3658-3661, 3684-3687, 3692-3694, 3711-3715, 3723, 3726, 3732, 3735-3737, 3739, 3743, 3748, 3750, 3772, 3776, 3777, 3779-3788, 3792-3797, 3799, 3801-3803, 3805, 3810, 3814, 3820-3824, 3850, 3862, 3875, 3888, 3889, 3912, 3970, 3971, 3993, 3994, 4002, 4018, 4047, 4069, 4129, 4156, 4230, 4231, 4262, 4373, 4526, 4529, 4532, 4538, 4540, 4560, 4562-4564, 4566-4570, 4578, 4623, 4625, and 4667.

[0141] In certain embodiments, the following antisense compounds or antisense oligonucleotides target a region of a DGAT2 nucleic acid and effect at least a 90% inhibition of a DGAT2 mRNA, ISIS NOs: 413433, 423463, 483817, 483825, 483834, 483848, 483866, 483869, 483873, 483874, 483895, 483898, 483908, 483910, 483913, 483952, 484085, 484148, 484157, 484170, 484181, 484231, 484271, 484283, 484350, 484353, 495449, 495450, 495495, 495498, 495505, 495506, 495516-495520, 495522-495524, 495526, 495527, 495535, 495553-495555, 495562, 495563, 495570, 495571, 495575-495577, 495620, 495752, 495809, 495825, 495829, 495836, 495837, 495839-495842, 495853, 495857, 495876, 495878, 501385, 501387, 501404, 501412, 501427, 501430, 501442, 501443, 501447, 501448, 501450, 501452, 501861, 522632, 522688, and 522745.

[0142] In certain embodiments, the following antisense compounds or antisense oligonucleotides target a region of a DGAT2 nucleic acid and effect at least a 90% inhibition of a DGAT2 mRNA, SEQ ID NOs: 283, 425, 457, 467, 510, 518, 527, 541, 559, 562, 566, 567, 1181, 1184, 1194, 1196, 1199, 1238, 1371, 1434, 1443, 1456, 1467, 1517, 1557, 1569, 1636, 1639, 1722, 1723, 1768, 1771, 1778, 1779, 1789-1793, 1795-1797, 1799, 1800, 1808, 1826-1828, 1835, 1836, 1843, 1844, 1848-1850, 1893, 2025, 2082, 2098, 2102, 2109, 2110, 2112-2115, 2126, 2130, 2149, 2151, 2313, 2315, 2332, 2340, 2355, 2358, 2370, 2371, 2375, 2376, 2378, 2380, 2959, 3737, 3793, 3850, 4562, 4564, 4566, 4568, and 4569.

[0143] In certain embodiments, a compound comprises a modified oligonucleotide consisting of 8 to 80 linked nucleosides having at least an 8, 9, 10, 11, 12, 13, 14, 15, or 16 contiguous nucleobase portion complementary to an equal length portion within nucleotides 26778-26797, 23242-23261, 26630-26649,15251-15270, 28026-28045, 35436-35455, 10820-10836, 23246-23262 of SEQ ID NO: 2

[0144] In certain embodiments, a compound comprises a modified oligonucleotide consisting of 10 to 30 linked nucleosides complementary within nucleotides 26778-26797, 23242-23261, 26630-26649,15251-15270, 28026-28045, 35436-35455, 10820-10836, 23246-23262 of SEQ ID NO: 2.

[0145] In certain embodiments, a compound comprises a modified oligonucleotide consisting of 8 to 80 linked nucleosides having a nucleobase sequence comprising at least an 8, 9, 10, 11, 12, 13, 14, 15, or 16 contiguous nucleobase portion any one of SEQ ID NOs: 1423, 1371, 1415, 1849, 2959, 3292, 4198, and 4373.

[0146] In certain embodiments, a compound comprises a modified oligonucleotide consisting of 10 to 30 linked nucleosides having a nucleobase sequence comprising any one of SEQ ID NOs: 1423, 1371, 1415, 1849, 2959, 3292, 4198, and 4373.

[0147] In certain embodiments, a compound comprises a modified oligonucleotide having a nucleobase sequence consisting of any one of SEQ ID NOs: 1423, 1371, 1415, 1849, 2959, 3292, 4198, and 4373. In certain embodiments, a modified oligonucleotide targeted to DGAT2 is ISIS 484137, 484085, 484129, 495576, 501861, 502194, 525443, and 525612.

[0148] In certain embodiments, a modified oligonucleotide targeted to DGAT2 is ISIS 484137, 484085, 484129, 495576, 501861, 502194, 525443, and 525612. Out of about 5,000 antisense oligonucleotides that were screened as described in the Examples section below, ISIS 484137, 484085, 484129, 495576, 501861, 502194, 525443, and 525612 emerged as the top lead compounds. In particular, ISIS 484137 exhibited the best combination of properties in terms of potency and tolerability out of about 5,000 antisense oligonucleotides.

[0149] In certain embodiments, any of the foregoing compounds or oligonucleotides comprises at least one modified internucleoside linkage, at least one modified sugar, and/or at least one modified nucleobase.

[0150] In certain aspects, any of the foregoing compounds or oligonucleotides comprises at least one modified sugar. In certain aspects, at least one modified sugar comprises a 2′-O-methoxyethyl group. In certain aspects, at least one modified sugar is a bicyclic sugar, such as a 4′-CH(CH₃)—O-2′ group, a 4′-CH₂—O-2′ group, or a 4′—(CH₂)₂—O-2′ group.

[0151] In certain aspects, the modified oligonucleotide comprises at least one modified internucleoside linkage, such as a phosphorothioate internucleoside linkage.

[0152] In certain embodiments, any of the foregoing compounds or oligonucleotides comprises at least one modified nucleobase, such as 5-methylcytosine.

[0153] In certain embodiments, any of the foregoing compounds or oligonucleotides comprises:
[0154] a gap segment consisting of linked 2′-deoxynucleosides;
[0155] a 5′ wing segment consisting of linked nucleosides; and
[0156] a 3′ wing segment consisting of linked nucleosides;
[0157] wherein the gap segment is positioned between the 5′ wing segment and the 3′ wing segment and wherein each nucleoside of each wing segment comprises a modified sugar. In certain embodiments, the oligonucleotide consists of 8 to 80 linked nucleosides having a nucleobase sequence comprising the sequence recited in SEQ ID NO: 1423, 1371, 1415, 1849, 2959, 3292, 4198, and 4373. In certain aspects, the oligonucleotide consists of 10 to 30 linked nucleosides having a nucleobase sequence comprising the sequence recited in SEQ ID NO: 1423, 1371, 1415, 1849, 2959, 3292, 4198, and 4373.

[0158] In certain aspects, the modified oligonucleotide has a nucleobase sequence comprising the sequence recited in SEQ ID NO: 1423, 1371, 1415, 1849, 2959, or 3292, wherein the modified oligonucleotide comprises
[0159] a gap segment consisting of ten linked 2′-deoxynucleosides;
[0160] a 5′ wing segment consisting of five linked nucleosides; and
[0161] a 3′ wing segment consisting of five linked nucleosides;
[0162] wherein the gap segment is positioned between the 5′ wing segment and the 3′ wing segment, wherein each nucleoside of each wing segment comprises a 2′-O-methoxyethyl sugar; wherein each internucleoside linkage is a phosphorothioate linkage and wherein each cytosine is a 5-methylcytosine. In certain embodiments, the modified oligonucleotide consists of 20-80 linked nucleosides. In certain embodiments, the modified oligonucleotide consists of 20-30 linked nucleosides.

[0163] In certain aspects, the modified oligonucleotide has a nucleobase sequence comprising the sequence recited in SEQ ID NO: 4198 or 4373, wherein the modified oligonucleotide comprises a gap segment consisting of ten linked 2′-deoxynucleosides;
[0164] a 5′ wing segment consisting of three linked nucleosides; and
[0165] a 3′ wing segment consisting of four linked nucleosides;
[0166] wherein the gap segment is positioned between the 5′ wing segment and the 3′ wing segment, wherein each nucleoside of each wing segment comprises a 2′-O-methoxyethyl sugar; wherein each internucleoside linkage is a phosphorothioate linkage and wherein each cytosine is a 5-methylcytosine. In certain embodiments, the modified oligonucleotide consists of 17-80 linked nucleosides. In certain embodiments, the modified oligonucleotide consists of 17-30 linked nucleosides.

[0167] In certain embodiments, a compound comprises or consists of ISIS 484137 and has the following chemical structure or a salt thereof:

[chemical structure]

[0168] In certain embodiments, a compound comprises or consists of ISIS 484137, named by accepted oligonucleotide nomenclature, showing each 3′-O to 5′-O-linked phosphorothioate diester internucleotide linkage as follows:

[0169] 2′-O-(2-methoxyethyl)-5-methyl-P-thiouridylyl-(3′-O→5′-O)—2′-O-(2-methoxyethyl)-P-thioguanylyl-(3′-O→5′-O)—2′-O-(2-methoxyethyl)-5-methyl-P-thiocytidylyl-(3′-O→5′-O)—2′-O-(2-methoxyethyl)-5-methyl-P-thiocytidylyl-(3′-O→5′-O)—2′-O-(2-methoxyethyl)-P-thioadenylyl-(3′-O→5′-O)—P-thiothymidylyl-(3′-O→5′-O)—P-thiothymidylyl-(3′-O→5′-O)—P-thiothymidylyl-(3′-O→5′-O)—2′-deoxy-P-thioadenylyl-(3′-O→5′-O)—2′-deoxy-P-thioadenylyl-(3′-O→5′-O)—P-thiothymidylyl-(3′-O→5′-O)—2′-deoxy-P-thioguanylyl-(3′-O→5′-O)—2′-deoxy-P-thioadenylyl-(3′-O→5′-O)—2′-deoxy-P-thioguanylyl-(3′-O→5′-O)—2′-deoxy-5-methyl-P-thiocytidylyl-(3′-O→5′-O)—2′-O-(2-methoxyethyl)-5-methyl-P-thiouridylyl-(3′-O→5′-O)—2′-O-(2-methoxyethyl)-5-methyl-P-thiouridylyl-(3′-O→5′-O)—2′-O-(2-methoxyethyl)-5-methyl-P-thiocytidylyl-(3′-O→5′-O)—2′-O-(2-methoxyethyl)-P-thioadenylyl-(3′-O→5′-O)—2′-O-(2-methoxyethyl)-5-methyl-cytidine, 19 sodium salt.

[0170] In any of the foregoing embodiments, the compound or oligonucleotide can be at least 85%, at least 90%, at least 95%, at least 98%, at least 99%, or 100% complementary to a nucleic acid encoding DGAT2.

[0171] In any of the foregoing embodiments, the antisense compound can be a single-stranded oligonucleotide.

[0172] In any of the foregoing embodiments, the oligonucleotide can consist of 8 to 80, 10 to 30, 12 to 50, 13 to 30, 13 to 50, 14 to 30, 14 to 50, 15 to 30, 15 to 50, 16 to 30, 16 to 50, 17 to 30, 17 to 50, 18 to 22, 18 to 24, 18 to 30, 18 to 50, 19 to 22, 19 to 30, 19 to 50, or 20 to 30 linked nucleosides.

[0173] In certain embodiments, compounds or compositions provided herein comprise a salt of the modified oligonucleotide. In certain embodiments, the salt is a sodium salt. In certain embodiments, the salt is a potassium salt.

[0174] In certain embodiments, a compound comprises a modified oligonucleotide described herein and a conjugate group. In certain embodiments, the conjugate group is linked to the modified oligonucleotide at the 5′ end of the modified oligonucleotide. In certain embodiments, the conjugate group is linked to the modified oligonucleotide at the 3′ end of the modified oligonucleotide. In certain embodiments, the conjugate group comprises at least one N-Acetylgalactosamine (GalNAc), at least two N-Acetylgalactosamines (GalNAcs), or at least three N-Acetylgalactosamines (GalNAcs).

[0175] In certain embodiments, a compound having the following chemical structure comprises or consists of ISIS 484137 or salt thereof with a conjugate group comprising GalNAc as described herein:

[chemical structure]

[0176] wherein for each pair of R₁ and R₂ on the same ring, independently for each ring, either R₁ is —OCH₂CH₂OCH₃ (MOE) and R₂ is H; or R₁ and R₂ together form a bridge, wherein R¹ is —O— and R₂ is —CH₂—, —CH(CH₃)—, or —CH₂CH₂—, and R¹ and R₂ are directly connected such that the resulting bridge is selected from: —O—CH₂—, —O—CH(CH₃)—, and —O—CH₂CH₂—; and for each pair of R₃ and R₄ on the same ring, independently for each ring: either R₃ is selected from H and —OCH₂CH₂OCH₃ and R₄ is H; or R₃ and R₄ together form a bridge, wherein R³ is —O—, and R₄ is —CH₂—, —CH(CH₃)—, or —CH₂CH₂—, and R₃ and R₄ are directly connected such that the resulting bridge is selected from: —O—CH₂—, —O—CH(CH₃)—, and —O—CH₂CH₂—; and each R⁵ is independently selected from H and —CH₃; and each Z is independently selected from S— and O—.

[0177] In certain embodiments, a compound comprises or consists of SEQ ID NO: 1423, 5′-GalNAc, and chemical modifications as represented by the following chemical structure:

[chemical structure]

[0178] wherein for each pair of R₁ and R₂ on the same ring, independently for each ring, either R₁ is —OCH₂CH₂OCH₃ (MOE) and R₂ is H; or R₁ and R₂ together form a bridge, wherein R¹ is —O— and R₂ is —CH₂—, —CH(CH₃)—, or —CH₂CH₂—, and R¹ and R₂ are directly connected such that the resulting bridge is selected from: —O—CH₂—, —O—CH(CH₃)—, and —O—CH₂CH₂—; and for each pair of R₃ and R₄ on the same ring, independently for each ring: either R₃ is selected from H and —OCH₂CH₂OCH₃ and R₄ is H; or R₃ and R₄ together form a bridge, wherein R³ is —O—, and R₄ is —CH₂—, —CH(CH₃)—, or —CH₂CH₂—, and R₃ and R₄ are directly connected such that the resulting bridge is selected from: —O—CH₂—, —O—CH(CH₃)—, and —O—CH₂CH₂—; and each R⁵ is independently selected from H and —CH₃; and each Z is independently selected from S— and O—; and X is H or a conjugate group that optionally comprises a conjugate linker and/or cleavable moiety.

[0179] In certain embodiments, a compound comprises ISIS 769355 or salt thereof. In certain embodiments, a compound consists of ISIS 769355 or salt thereof. In certain embodiments, ISIS 769355 has the following chemical structure:

[chemical structure]

[0180] In certain embodiments, a compound comprises ISIS 769356 or salt thereof. In certain embodiments, a compound consists of ISIS 769356 or salt thereof. In certain embodiments, ISIS 769356 has the following chemical structure:

[chemical structure]

[0181] In certain embodiments, a compound comprises ISIS 769357 or salt thereof. In certain embodiments, a compound consists of ISIS 769357 or salt thereof. In certain embodiments, ISIS 769357 has the following chemical structure:

[chemical structure]

[0182] Certain embodiments provide compositions comprising any of the compounds comprising or consisting of a modified oligonucleotide targeted to DGAT2 or salt thereof and a conjugate group, and at least one of a pharmaceutically acceptable carrier or diluent.

[0183] In certain embodiments, the compounds or compositions as described herein are efficacious by virtue of having at least one of an in vitro IC₅₀ of less than 2 nM, less than 3 nM, less than 4 nM, less than 5 nM, less than 6 nM, less than 7 nM, less than 8 nM, less than 9 nM, less than 10 nM, less than 20 nM, less than 30 nM, less than 35 nM, less than 40 nM, less than 45 nM, less than 50 nM, less than 60 nM, less than 70 nM, less than 80 nM, less than 90 nM, less than 100 nM, less than 110 nM, less than 300 nM, less than 400 nM, less than 500 nM, less than 600 nM, less than 700 nM, less than 800 nM, less than 900 nM, less than 1 μM, less than 1.1 μM, less than 1.2 μM, less than 1.3 μM, less than 1.4 μM, less than 1.5 μM, less than 1.6 μM, less than 1.7 μM, less than 1.8 μM, less than 1.9 μM, less than 2 μM, less than 2.5 μM, less than 3 μM, less than 3.5 μM, less than 4 μM, less than 4.5 μM, less than 5 μM, less than 5.5 μM, less than 6 μM, less than 6.5 μM, or less than 10 μM.

[0184] In certain embodiments, the compounds or compositions as described herein are highly tolerable as demonstrated by having at least one of an increase an ALT or AST value of no more than 4 fold, 3 fold, or 2 fold over saline treated animals or an increase in liver, spleen, or kidney weight of no more than 30%, 20%, 15%, 12%, 10%, 5%, or 2%. In certain embodiments, the compounds or compositions as described herein are highly tolerable as demonstrated by having no increase of ALT or AST over saline treated animals. In certain embodiments, the compounds or compositions as described herein are highly tolerable as demonstrated by having no increase in liver, spleen, or kidney weight over saline treated animals.

### Certain Indications

[0185] Certain embodiments provided herein relate to methods of treating, preventing, or ameliorating a disease associated with DGAT2 in an individual by administration of a DGAT2 specific inhibitor, such as an antisense compound targeted to DGAT2.

[0186] Examples of diseases associated with DGAT2 treatable, preventable, and/or ameliorable with the methods provided herein include nonalcoholic fatty liver diseases (NAFLD), nonalcoholic steatohepatitis (NASH), hepatic steatosis, fatty liver diseases, lipodystrophy syndromes, including congenital generalized lipodystrophy (CGL), acquired generalized lipodystrophy (AGL), familial partial lipodystrophy (FPL), and acquired partial lipodystrophy (PL), metabolic syndrome and cardiovascular diseases.

[0187] In certain embodiments, a method of treating, preventing, or ameliorating a disease associated with NAFLD in an individual comprises administering to the individual a specific inhibitor of DGAT2, thereby treating, preventing, or ameliorating the disease. In certain embodiments, a method of treating, preventing, or ameliorating a disease associated with lipodystrophy syndrome in an individual comprises administering to the individual a specific inhibitor of DGAT2, thereby treating, preventing, or ameliorating the disease. In certain embodiments, the lipodystrophy syndrome is partial lipodystrophy. In certain embodiments, the DGAT2 specific inhibitor is an antisense compound targeted to DGAT2, such as an antisense oligonucleotide targeted to DGAT2. In certain embodiments, the DGAT2 specific inhibitor is a compound comprising or consisting of a modified oligonucleotide and a conjugate group, wherein the modified oligonucleotide consists of 10 to 30 linked nucleosides and has a nucleobase sequence comprising the nucleobase sequence of any one of SEQ ID NOs: 16-4679. In certain embodiments, the DGAT2 specific inhibitor is an antisense compound comprising a modified oligonucleotide consisting of 10 to 30 linked nucleosides and having a nucleobase sequence comprising at least 8 contiguous nucleobases of any of the nucleobase sequences of SEQ ID NOs: 16-4679. In certain embodiments, the DGAT2 specific inhibitor is an antisense compound comprising a modified oligonucleotide consisting of 10 to 30 linked nucleosides and having a nucleobase sequence comprising the nucleobase sequence of any one of SEQ ID NOs: 16-4679. In certain embodiments, the DGAT2 specific inhibitor is an antisense compound comprising a modified oligonucleotide consisting of the nucleobase sequence of any one of SEQ ID NOs: 16-4679. In certain embodiments, the DGAT2 specific inhibitor is an antisense compound comprising a modified oligonucleotide consisting of 10 to 30 linked nucleosides having a nucleobase sequence comprising any one of SEQ ID NOs: 1423, 1371, 1415, 1849, 2959, 3292, 4198, and 4373. In certain embodiments, the DGAT2 specific inhibitor is an antisense compound comprising or consisting of a modified oligonucleotide and a conjugate group, wherein the modified oligonucleotide consists of 10 to 30 linked nucleosides having a nucleobase sequence comprising any one of SEQ ID NOs: 1423, 1371, 1415, 1849, 2959, 3292, 4198, and 4373. In certain embodiments, the DGAT2 specific inhibitor is an antisense compound comprising a modified oligonucleotide having a nucleobase sequence consisting of any one of SEQ ID NOs: 1423, 1371, 1415, 1849, 2959, 3292, 4198, and 4373. In certain embodiments, the DGAT2 specific inhibitor is ISIS 484137, ISIS 484085, ISIS 484129, ISIS 495576, ISIS 501861, ISIS 502194, ISIS 525443, and ISIS 525612. In certain embodiments the DGAT2 specific inhibitor is ISIS 769355, ISIS 769356, and ISIS 769357. In any of the foregoing embodiments, the antisense compound can be a single-stranded oligonucleotide.

[0188] In certain embodiments, a method of treating, preventing, or ameliorating NAFLD/NASH comprises administering to the individual a DGAT2 specific inhibitor, thereby treating, preventing, or ameliorating NALFD/NASH. In certain embodiments, a method of treating, preventing, or ameliorating lipodystrophy comprises administering to the individual a DGAT2 specific inhibitor, thereby treating, preventing, or ameliorating lipodystrophy syndrome. In certain embodiments, the lipodystrophy syndrome is partial lipodystrophy. In certain embodiments, the DGAT2 specific inhibitor is an antisense compound targeted to DGAT2, such as an antisense oligonucleotide targeted to DGAT2. In certain embodiments, the DGAT2 specific inhibitor is a compound comprising or consisting of a modified oligonucleotide and a conjugate group, wherein the modified oligonucleotide consists of 10 to 30 linked nucleosides and has a nucleobase sequence comprising the nucleobase sequence of any one of SEQ ID NOs: 16-4679. In certain embodiments, the DGAT2 specific inhibitor is an antisense compound comprising a modified oligonucleotide consisting of 10 to 30 linked nucleosides and having a nucleobase sequence comprising at least 8 contiguous nucleobases of any of the nucleobase sequences of SEQ ID NOs: 16-4679. In certain embodiments, the DGAT2 specific inhibitor is an antisense compound comprising a modified oligonucleotide consisting of 10 to 30 linked nucleosides and having a nucleobase sequence comprising the nucleobase sequence of any one of SEQ ID NOs: 16-4679. In certain embodiments, the DGAT2 specific inhibitor is an antisense compound comprising a modified oligonucleotide consisting of the nucleobase sequence of any one of SEQ ID NOs: 16-4679. In certain embodiments, the DGAT2 specific inhibitor is an antisense compound comprising a modified oligonucleotide consisting of 10 to 30 linked nucleosides having a nucleobase sequence comprising any one of SEQ ID NOs: 1423, 1371, 1415, 1849, 2959, 3292, 4198, and 4373. In certain embodiments, the DGAT2 specific inhibitor is an antisense compound comprising or consisting of a modified oligonucleotide and a conjugate group, wherein the modified oligonucleotide consists of 10 to 30 linked nucleosides having a nucleobase sequence comprising any one of SEQ ID NOs: 1423, 1371, 1415, 1849, 2959, 3292, 4198, and 4373. In certain embodiments, the DGAT2 specific inhibitor is an antisense compound comprising a modified oligonucleotide having a nucleobase sequence consisting of any one of SEQ ID NOs: 1423, 1371, 1415, 1849, 2959, 3292, 4198, and 4373. In certain embodiments, the DGAT2 specific inhibitor is ISIS 484137, ISIS 484085, ISIS 484129, ISIS 495576, ISIS 501861, ISIS 502194, ISIS 525443, and ISIS 525612. In certain embodiments the DGAT2 specific inhibitor is ISIS 769355, ISIS 769356, and ISIS 769357. In any of the foregoing embodiments, the antisense compound can be a single-stranded oligonucleotide. In certain aspects, the antisense compound is administered to the individual parenterally. In certain aspects, administering the antisense compound results in specific reduction of DGAT2 expression, reduction in the rate of triglyceride synthesis, improvement of hepatic steatosis and blood lipid levels, reduction of hepatic lipids, reversal of diet-induced hepatic insulin resistance, and improvement in hepatic insulin sensitivity. In certain aspects, administering the antisense compound results in reduction in liver steatosis and fibrosis. In certain aspects, administering the antisense compound results in improvements in ALT levels. In certain aspects, administering the antisense compound results in decrease in NAFLD Activity Score (NAS). In certain aspects, administering the antisense compound results in reduction in serum total cholesterol and triglycerides. In certain aspects, administering the antisense compound results in neutral insulin sensitivity and glycemic control. In certain aspects, administering the antisense compound results in improved insulin sensitivity and glycemic control. In certain aspects, the individual is identified as having or at risk of having a disease associated with NAFLD. In certain aspects, the individual is identified as having or at risk of having a disease associated with lipodystrophy syndrome.

[0189] In certain embodiments, a method of inhibiting expression of DGAT2 in an individual having, or at risk of having, a disease associated with NAFLD comprises administering a DGAT2 specific inhibitor to the individual, thereby inhibiting expression of DGAT2 in the individual. In certain embodiments, a method of inhibiting expression of DGAT2 in an individual having, or at risk of having, a disease associated with lipodystrophy syndrome comprises administering a DGAT2 specific inhibitor to the individual, thereby inhibiting expression of DGAT2 in the individual. In certain aspects, administering the inhibitor inhibits expression of DGAT2 in the liver. In certain aspects, administering the inhibitor inhibits expression of DGAT2 in adipose tissue. In certain aspects, the individual has, or is at risk of having lipodystrophy syndrome, partial lipodystrophy, liver steatosis, NAFLD, or NASH. In certain embodiments, the DGAT2 specific inhibitor is an antisense compound targeted to DGAT2, such as an antisense oligonucleotide targeted to DGAT2. In certain embodiments, the DGAT2 specific inhibitor is a compound comprising or consisting of a modified oligonucleotide and a conjugate group, wherein the modified oligonucleotide consists of 10 to 30 linked nucleosides and has a nucleobase sequence comprising the nucleobase sequence of any one of SEQ ID NOs: 16-4679. In certain embodiments, the DGAT2 specific inhibitor is an antisense compound comprising a modified oligonucleotide consisting of 10 to 30 linked nucleosides and having a nucleobase sequence comprising at least 8 contiguous nucleobases of any of the nucleobase sequences of SEQ ID NOs: 16-4679. In certain embodiments, the DGAT2 specific inhibitor is an antisense compound comprising a modified oligonucleotide consisting of 10 to 30 linked nucleosides and having a nucleobase sequence comprising the nucleobase sequence of any one of SEQ ID NOs: 16-4679. In certain embodiments, the DGAT2 specific inhibitor is an antisense compound comprising a modified oligonucleotide consisting of the nucleobase sequence of any one of SEQ ID NOs: 16-4679. In certain embodiments, the DGAT2 specific inhibitor is an antisense compound comprising a modified oligonucleotide consisting of 10 to 30 linked nucleosides having a nucleobase sequence comprising any one of SEQ ID NOs: 1423, 1371, 1415, 1849, 2959, 3292, 4198, and 4373. In certain embodiments, the DGAT2 specific inhibitor is an antisense compound comprising or consisting of a modified oligonucleotide and a conjugate group, wherein the modified oligonucleotide consists of 10 to 30 linked nucleosides having a nucleobase sequence comprising any one of SEQ ID NOs: 1423, 1371, 1415, 1849, 2959, 3292, 4198, and 4373. In certain embodiments, the DGAT2 specific inhibitor is an antisense compound comprising a modified oligonucleotide having a nucleobase sequence consisting of any one of SEQ ID NOs: 1423, 1371, 1415, 1849, 2959, 3292, 4198, and 4373. In certain embodiments, the DGAT2 specific inhibitor is ISIS 484137, ISIS 484085, ISIS 484129, ISIS 495576, ISIS 501861, ISIS 502194, ISIS 525443, and ISIS 525612. In certain embodiments the DGAT2 specific inhibitor is ISIS 769355, ISIS 769356, and ISIS 769357. In any of the foregoing embodiments, the antisense compound can be a single-stranded oligonucleotide.

[0190] In certain embodiments, a method of reducing or inhibiting triglyceride synthesis, hepatic lipid synthesis and insulin resistance in the liver of an individual having, or at risk of having, a disease associated with DGAT2 comprises administering a DGAT2 specific inhibitor to the individual, thereby reducing or inhibiting triglyceride synthesis, hepatic lipid synthesis and insulin resistance in the liver of the individual. In certain embodiments, a method of reducing or inhibiting triglyceride synthesis, lipid synthesis and insulin resistance in the adipose tissue of an individual having, or at risk of having, a disease associated with DGAT2 comprises administering a DGAT2 specific inhibitor to the individual, thereby reducing or inhibiting triglyceride synthesis, lipid synthesis and insulin resistance in the adipose tissue of the individual. In certain aspects, administering the DGAT2 inhibitor leads to improvement in hepatic insulin signaling, hepatic insulin sensitivity and cardiovascular risk profile. In certain aspects, administering the DGAT2 specific inhibitor results in reduction in liver steatosis and fibrosis. In certain aspects, administering the DGAT2 specific inhibitor results in improvements in ALT levels. In certain aspects, administering the DGAT2 specific inhibitor results in decrease in NAFLD Activity Score (NAS). In certain aspects, administering the DGAT2 specific inhibitor results in reduction in serum total cholesterol and triglycerides. In certain aspects, administering the DGAT2 specific inhibitor results in neutral insulin sensitivity and glycemic control. In certain aspects, administering the antisense compound results in improved insulin sensitivity and glycemic control. In certain aspects, the individual has, or is at risk of having, NAFLD or NASH. In certain aspects, the individual has, or is at risk of having, lipodystrophy syndrome or partial lipodystrophy. In certain aspects, the inhibitor is an antisense compound targeted to DGAT2. In certain embodiments, the DGAT2 specific inhibitor is an antisense compound targeted to DGAT2, such as an antisense oligonucleotide targeted to DGAT2. In certain embodiments, the DGAT2 specific inhibitor is a compound comprising or consisting of a modified oligonucleotide and a conjugate group, wherein the modified oligonucleotide consists of 10 to 30 linked nucleosides and has a nucleobase sequence comprising the nucleobase sequence of any one of SEQ ID NOs: 16-4679. In certain embodiments, the DGAT2 specific inhibitor is an antisense compound comprising a modified oligonucleotide consisting of 10 to 30 linked nucleosides and having a nucleobase sequence comprising at least 8 contiguous nucleobases of any of the nucleobase sequences of SEQ ID NOs: 16-4679. In certain embodiments, the DGAT2 specific inhibitor is an antisense compound comprising a modified oligonucleotide consisting of 10 to 30 linked nucleosides and having a nucleobase sequence comprising the nucleobase sequence of any one of SEQ ID NOs: 16-4679. In certain embodiments, the DGAT2 specific inhibitor is an antisense compound comprising a modified oligonucleotide consisting of the nucleobase sequence of any one of SEQ ID NOs: 16-4679. In certain embodiments, the DGAT2 specific inhibitor is an antisense compound comprising a modified oligonucleotide consisting of 10 to 30 linked nucleosides having a nucleobase sequence comprising any one of SEQ ID NOs: 1423, 1371, 1415, 1849, 2959, 3292, 4198, and 4373. In certain embodiments, the DGAT2 specific inhibitor is an antisense compound comprising or consisting of a modified oligonucleotide and a conjugate group, wherein the modified oligonucleotide consists of 10 to 30 linked nucleosides having a nucleobase sequence comprising any one of SEQ ID NOs: 1423, 1371, 1415, 1849, 2959, 3292, 4198, and 4373. In certain embodiments, the DGAT2 specific inhibitor is an antisense compound comprising a modified oligonucleotide having a nucleobase sequence consisting of any one of SEQ ID NOs: 1423, 1371, 1415, 1849, 2959, 3292, 4198, and 4373. In certain embodiments, the DGAT2 specific inhibitor is ISIS 484137, ISIS 484085, ISIS 484129, ISIS 495576, ISIS 501861, ISIS 502194, ISIS 525443, and ISIS 525612. In certain embodiments the DGAT2 specific inhibitor is ISIS 769355, ISIS 769356, and ISIS 769357. In any of the foregoing embodiments, the antisense compound can be a single-stranded oligonucleotide. In certain aspects, the antisense compound is administered to the individual parenterally.

[0191] Certain embodiments are drawn to a DGAT2 specific inhibitor for use in treating a disease associated with NAFLD. In certain aspects, the disease is NASH. In certain aspects, the disease is hepatic steatosis. In certain aspects, the disease is liver cirrhosis. In certain aspects, the disease is hepatocellular carcinoma. Certain embodiments are drawn to a DGAT2 specific inhibitor for use in treating a disease associated with lipodystrophy syndromes. In certain aspects, the disease is partial lipodystrophy. In certain aspects, the inhibitor is an antisense compound targeted to DGAT2. In certain embodiments, the DGAT2 specific inhibitor is an antisense compound targeted to DGAT2, such as an antisense oligonucleotide targeted to DGAT2. In certain embodiments, the DGAT2 specific inhibitor is a compound comprising or consisting of a modified oligonucleotide and a conjugate group, wherein the modified oligonucleotide consists of 10 to 30 linked nucleosides and has a nucleobase sequence comprising the nucleobase sequence of any one of SEQ ID NOs: 16-4679. In certain embodiments, the DGAT2 specific inhibitor is an antisense compound comprising a modified oligonucleotide consisting of 10 to 30 linked nucleosides and having a nucleobase sequence comprising at least 8 contiguous nucleobases of any of the nucleobase sequences of SEQ ID NOs: 16-4679. In certain embodiments, the DGAT2 specific inhibitor is an antisense compound comprising a modified oligonucleotide consisting of 10 to 30 linked nucleosides and having a nucleobase sequence comprising the nucleobase sequence of any one of SEQ ID NOs: 16-4679. In certain embodiments, the DGAT2 specific inhibitor is an antisense compound comprising a modified oligonucleotide consisting of the nucleobase sequence of any one of SEQ ID NOs: 16-4679. In certain embodiments, the DGAT2 specific inhibitor is an antisense compound comprising a modified oligonucleotide consisting of 10 to 30 linked nucleosides having a nucleobase sequence comprising any one of SEQ ID NOs: 1423, 1371, 1415, 1849, 2959, 3292, 4198, and 4373. In certain embodiments, the DGAT2 specific inhibitor is an antisense compound comprising or consisting of a modified oligonucleotide and a conjugate group, wherein the modified oligonucleotide consists of 10 to 30 linked nucleosides having a nucleobase sequence comprising any one of SEQ ID NOs: 1423, 1371, 1415, 1849, 2959, 3292, 4198, and 4373. In certain embodiments, the DGAT2 specific inhibitor is an antisense compound comprising a modified oligonucleotide having a nucleobase sequence consisting of any one of SEQ ID NOs: 1423, 1371, 1415, 1849, 2959, 3292, 4198, and 4373. In certain embodiments, the DGAT2 specific inhibitor is ISIS 484137, ISIS 484085, ISIS 484129, ISIS 495576, ISIS 501861, ISIS 502194, ISIS 525443, and ISIS 525612. In certain embodiments the DGAT2 specific inhibitor is ISIS 769355, ISIS 769356, and ISIS 769357. In any of the foregoing embodiments, the antisense compound can be a single-stranded oligonucleotide. In certain aspects, the antisense compound is administered to the individual parenterally.

[0192] Certain embodiments are drawn to a DGAT2 specific inhibitor for reducing or inhibiting triglyceride synthesis, hepatic lipid synthesis and insulin resistance in the liver of an individual having, or at risk of having, a disease associated with NAFLD or lipodystrophy syndromes comprises administering a DGAT2 specific inhibitor to the individual, thereby reducing or inhibiting triglyceride synthesis, hepatic lipid synthesis and insulin resistance in the liver of the individual. Certain embodiments are drawn to a DGAT2 specific inhibitor for reducing or inhibiting triglyceride synthesis, lipid synthesis and insulin resistance in the adipose tissue of an individual having, or at risk of having, a disease associated with NAFLD or lipodystrophy syndromes comprises administering a DGAT2 specific inhibitor to the individual, thereby reducing or inhibiting triglyceride synthesis, lipid synthesis and insulin resistance in the adipose tissue of the individual. In certain embodiments, the DGAT2 specific inhibitor is an antisense compound targeted to DGAT2, such as an antisense oligonucleotide targeted to DGAT2. In certain embodiments, the DGAT2 specific inhibitor is a compound comprising or consisting of a modified oligonucleotide and a conjugate group, wherein the modified oligonucleotide consists of 10 to 30 linked nucleosides and has a nucleobase sequence comprising the nucleobase sequence of any one of SEQ ID NOs: 16-4679. In certain embodiments, the DGAT2 specific inhibitor is an antisense compound comprising a modified oligonucleotide consisting of 10 to 30 linked nucleosides and having a nucleobase sequence comprising at least 8 contiguous nucleobases of any of the nucleobase sequences of SEQ ID NOs: 16-4679. In certain embodiments, the DGAT2 specific inhibitor is an antisense compound comprising a modified oligonucleotide consisting of 10 to 30 linked nucleosides and having a nucleobase sequence comprising the nucleobase sequence of any one of SEQ ID NOs: 16-4679. In certain embodiments, the DGAT2 specific inhibitor is an antisense compound comprising a modified oligonucleotide consisting of the nucleobase sequence of any one of SEQ ID NOs: 16-4679. In certain embodiments, the DGAT2 specific inhibitor is an antisense compound comprising a modified oligonucleotide consisting of 10 to 30 linked nucleosides having a nucleobase sequence comprising any one of SEQ ID NOs: 1423, 1371, 1415, 1849, 2959, 3292, 4198, and 4373. In certain embodiments, the DGAT2 specific inhibitor is an antisense compound comprising or consisting of a modified oligonucleotide and a conjugate group, wherein the modified oligonucleotide consists of 10 to 30 linked nucleosides having a nucleobase sequence comprising any one of SEQ ID NOs: 1423, 1371, 1415, 1849, 2959, 3292, 4198, and 4373. In certain embodiments, the DGAT2 specific inhibitor is an antisense compound comprising a modified oligonucleotide having a nucleobase sequence consisting of any one of SEQ ID NOs: 1423, 1371, 1415, 1849, 2959, 3292, 4198, and 4373. In certain embodiments, the DGAT2 specific inhibitor is ISIS 484137, ISIS 484085, ISIS 484129, ISIS 495576, ISIS 501861, ISIS 502194, ISIS 525443, and ISIS 525612. In certain embodiments the DGAT2 specific inhibitor is ISIS 769355, ISIS 769356, and ISIS 769357. In any of the foregoing embodiments, the antisense compound can be a single-stranded oligonucleotide.

[0193] Certain embodiments are drawn to use of a DGAT2 specific inhibitor for the manufacture of a medicament for treating a disease associated with NAFLD. In certain aspects, the disease is NASH. In certain aspects, the disease is hepatic steatosis. In certain aspects, the disease is liver cirrhosis. In certain aspects, the disease is hepatocellular carcinoma. Certain embodiments are drawn to use of a DGAT2 specific inhibitor for the manufacture of a medicament for treating a disease associated with lipodystrophy syndromes. In certain aspects, the disease is partial lipodystrophy. In certain aspects, the inhibitor is an antisense compound targeted to DGAT2. In certain embodiments, the DGAT2 specific inhibitor is an antisense compound targeted to DGAT2, such as an antisense oligonucleotide targeted to DGAT2. In certain embodiments, the DGAT2 specific inhibitor is a compound comprising or consisting of a modified oligonucleotide and a conjugate group, wherein the modified oligonucleotide consists of 10 to 30 linked nucleosides and has a nucleobase sequence comprising the nucleobase sequence of any one of SEQ ID NOs: 16-4679. In certain embodiments, the DGAT2 specific inhibitor is an antisense compound comprising a modified oligonucleotide consisting of 10 to 30 linked nucleosides and having a nucleobase sequence comprising at least 8 contiguous nucleobases of any of the nucleobase sequences of SEQ ID NOs: 16-4679. In certain embodiments, the DGAT2 specific inhibitor is an antisense compound comprising a modified oligonucleotide consisting of 10 to 30 linked nucleosides and having a nucleobase sequence comprising the nucleobase sequence of any one of SEQ ID NOs: 16-4679. In certain embodiments, the DGAT2 specific inhibitor is an antisense compound comprising a modified oligonucleotide consisting of the nucleobase sequence of any one of SEQ ID NOs: 16-4679. In certain embodiments, the DGAT2 specific inhibitor is an antisense compound comprising a modified oligonucleotide consisting of 10 to 30 linked nucleosides having a nucleobase sequence comprising any one of SEQ ID NOs: 1423, 1371, 1415, 1849, 2959, 3292, 4198, and 4373. In certain embodiments, the DGAT2 specific inhibitor is an antisense compound comprising or consisting of a modified oligonucleotide and a conjugate group, wherein the modified oligonucleotide consists of 10 to 30 linked nucleosides having a nucleobase sequence comprising any one of SEQ ID NOs: 1423, 1371, 1415, 1849, 2959, 3292, 4198, and 4373. In certain embodiments, the DGAT2 specific inhibitor is an antisense compound comprising a modified oligonucleotide having a nucleobase sequence consisting of any one of SEQ ID NOs: 1423, 1371, 1415, 1849, 2959, 3292, 4198, and 4373. In certain embodiments, the DGAT2 specific inhibitor is ISIS 484137, ISIS 484085, ISIS 484129, ISIS 495576, ISIS 501861, ISIS 502194, ISIS 525443, and ISIS 525612. In certain embodiments the DGAT2 specific inhibitor is ISIS 769355, ISIS 769356, and ISIS 769357. In any of the foregoing embodiments, the antisense compound can be a single-stranded oligonucleotide. In certain aspects, the antisense compound is administered to the individual parenterally.

[0194] Certain embodiments are drawn to use of a DGAT2 specific inhibitor for the manufacture of a medicament for reducing or inhibiting triglyceride synthesis, hepatic lipid synthesis and insulin resistance in the liver of an individual having, or at risk of having, a disease associated with NAFLD or lipodystrophy syndromes. Certain embodiments are drawn to use of a DGAT2 specific inhibitor for the manufacture of a medicament for reducing or inhibiting triglyceride synthesis, hepatic lipid synthesis and insulin resistance in the liver of an individual having, or at risk of having, a disease associated with NAFLD or lipodystrophy syndromes. Certain embodiments are drawn to use of a DGAT2 specific inhibitor for the manufacture of a medicament for reducing or inhibiting triglyceride synthesis, lipid synthesis and insulin resistance in the adipose tissue of an individual having, or at risk of having, a disease associated with NAFLD or lipodystrophy syndromes. Certain embodiments are drawn to use of a DGAT2 specific inhibitor for the manufacture of a medicament for reducing or inhibiting triglyceride synthesis, lipid synthesis and insulin resistance in the adipose tissue of an individual having, or at risk of having, a disease associated with NAFLD or lipodystrophy syndromes. In certain embodiments, the DGAT2 specific inhibitor is an antisense compound targeted to DGAT2, such as an antisense oligonucleotide targeted to DGAT2. In certain embodiments, the DGAT2 specific inhibitor is a compound comprising or consisting of a modified oligonucleotide and a conjugate group, wherein the modified oligonucleotide consists of 10 to 30 linked nucleosides and has a nucleobase sequence comprising the nucleobase sequence of any one of SEQ ID NOs: 16-4679. In certain embodiments, the DGAT2 specific inhibitor is an antisense compound comprising a modified oligonucleotide consisting of 10 to 30 linked nucleosides and having a nucleobase sequence comprising at least 8 contiguous nucleobases of any of the nucleobase sequences of SEQ ID NOs: 16-4679. In certain embodiments, the DGAT2 specific inhibitor is an antisense compound comprising a modified oligonucleotide consisting of 10 to 30 linked nucleosides and having a nucleobase sequence comprising the nucleobase sequence of any one of SEQ ID NOs: 16-4679. In certain embodiments, the DGAT2 specific inhibitor is an antisense compound comprising a modified oligonucleotide consisting of the nucleobase sequence of any one of SEQ ID NOs: 16-4679. In certain embodiments, the DGAT2 specific inhibitor is an antisense compound comprising a modified oligonucleotide consisting of 10 to 30 linked nucleosides having a nucleobase sequence comprising any one of SEQ ID NOs: 1423, 1371, 1415, 1849, 2959, 3292, 4198, and 4373. In certain embodiments, the DGAT2 specific inhibitor is an antisense compound comprising or consisting of a modified oligonucleotide and a conjugate group, wherein the modified oligonucleotide consists of 10 to 30 linked nucleosides having a nucleobase sequence comprising any one of SEQ ID NOs: 1423, 1371, 1415, 1849, 2959, 3292, 4198, and 4373. In certain embodiments, the DGAT2 specific inhibitor is an antisense compound comprising a modified oligonucleotide having a nucleobase sequence consisting of any one of SEQ ID NOs: 1423, 1371, 1415, 1849, 2959, 3292, 4198, and 4373. In certain embodiments, the DGAT2 specific inhibitor is ISIS 484137, ISIS 484085, ISIS 484129, ISIS 495576, ISIS 501861, ISIS 502194, ISIS 525443, and ISIS 525612. In certain embodiments the DGAT2 specific inhibitor is ISIS 769355, ISIS 769356, and ISIS 769357. In any of the foregoing embodiments, the antisense compound can be a single-stranded oligonucleotide.

[0195] In certain embodiments, a method of inhibiting expression of DGAT2 in a cell comprises contacting the cell with a DGAT2 specific inhibitor. In certain embodiments, the cell is a hepatocyte. In certain embodiments, the cell is in the liver of an individual. In certain embodiments, the cell is an adipose tissue cell of an individual. In certain embodiments, the cell is in the adipose tissue of an individual. In certain embodiments, the DGAT2 specific inhibitor is an antisense compound targeted to DGAT2, such as an antisense oligonucleotide targeted to DGAT2. In certain embodiments, the DGAT2 specific inhibitor is a compound comprising or consisting of a modified oligonucleotide and a conjugate group, wherein the modified oligonucleotide consists of 10 to 30 linked nucleosides and has a nucleobase sequence comprising the nucleobase sequence of any one of SEQ ID NOs: 16-4679. In certain embodiments, the DGAT2 specific inhibitor is an antisense compound comprising a modified oligonucleotide consisting of 10 to 30 linked nucleosides and having a nucleobase sequence comprising at least 8 contiguous nucleobases of any of the nucleobase sequences of SEQ ID NOs: 16-4679. In certain embodiments, the DGAT2 specific inhibitor is an antisense compound comprising a modified oligonucleotide consisting of 10 to 30 linked nucleosides and having a nucleobase sequence comprising the nucleobase sequence of any one of SEQ ID NOs: 16-4679. In certain embodiments, the DGAT2 specific inhibitor is an antisense compound comprising a modified oligonucleotide consisting of the nucleobase sequence of any one of SEQ ID NOs: 16-4679. In certain embodiments, the DGAT2 specific inhibitor is an antisense compound comprising a modified oligonucleotide consisting of 10 to 30 linked nucleosides having a nucleobase sequence comprising any one of SEQ ID NOs: 1423, 1371, 1415, 1849, 2959, 3292, 4198, and 4373. In certain embodiments, the DGAT2 specific inhibitor is an antisense compound comprising or consisting of a modified oligonucleotide and a conjugate group, wherein the modified oligonucleotide consists of 10 to 30 linked nucleosides having a nucleobase sequence comprising any one of SEQ ID NOs: 1423, 1371, 1415, 1849, 2959, 3292, 4198, and 4373. In certain embodiments, the DGAT2 specific inhibitor is an antisense compound comprising a modified oligonucleotide having a nucleobase sequence consisting of any one of SEQ ID NOs: 1423, 1371, 1415, 1849, 2959, 3292, 4198, and 4373. In certain embodiments, the DGAT2 specific inhibitor is ISIS 484137, ISIS 484085, ISIS 484129, ISIS 495576, ISIS 501861, ISIS 502194, ISIS 525443, and ISIS 525612. In certain embodiments the DGAT2 specific inhibitor is ISIS 769355, ISIS 769356, and ISIS 769357. In any of the foregoing embodiments, the antisense compound can be a single-stranded oligonucleotide. In certain aspects, the antisense compound is administered to the individual parenterally.

[0196] In any of the foregoing embodiments, the DGAT2 specific inhibitor can be an antisense compound targeted to DGAT2. In certain aspects, the antisense compound is an antisense oligonucleotide, for example an antisense oligonucleotide consisting of 8 to 80 linked nucleosides, 12 to 30 linked nucleosides, or 20 linked nucleosides. In certain aspects, the antisense oligonucleotide is at least 80%, 85%, 90%, 95% or 100% complementary to any of the nucleobase sequences recited in SEQ ID NOs: 1-4. In certain aspects, the antisense oligonucleotide comprises at least one modified internucleoside linkage, at least one modified sugar and/or at least one modified nucleobase. In certain aspects, the modified internucleoside linkage is a phosphorothioate internucleoside linkage, the modified sugar is a bicyclic sugar or a 2′-O-methoxyethyl, and the modified nucleobase is a 5-methylcytosine. In certain aspects, the modified oligonucleotide comprises a gap segment consisting of linked 2′-deoxynucleosides; a 5′ wing segment consisting of linked nucleosides; and a 3′ wing segment consisting of linked nucleosides, wherein the gap segment is positioned immediately adjacent to and between the 5′ wing segment and the 3′ wing segment and wherein each nucleoside of each wing segment comprises a modified sugar.

[0197] In any of the foregoing embodiments, the antisense oligonucleotide consists of 12 to 30, 15 to 30, 15 to 25, 15 to 24, 16 to 24, 17 to 24, 18 to 24, 19 to 24, 20 to 24, 19 to 22, 20 to 22, 16 to 20, or 17 or 20 linked nucleosides. In certain aspects, the antisense oligonucleotide is at least 80%, 85%, 90%, 95% or 100% complementary to any of the nucleobase sequences recited in SEQ ID NOs: 1-4. In certain aspects, the antisense oligonucleotide comprises at least one modified internucleoside linkage, at least one modified sugar and/or at least one modified nucleobase. In certain aspects, the modified internucleoside linkage is a phosphorothioate internucleoside linkage, the modified sugar is a bicyclic sugar or a 2′-O-methoxyethyl, and the modified nucleobase is a 5-methylcytosine. In certain aspects, the modified oligonucleotide comprises a gap segment consisting of linked 2′-deoxynucleosides; a 5′ wing segment consisting of linked nucleosides; and a 3′ wing segment consisting of linked nucleosides, wherein the gap segment is positioned immediately adjacent to and between the 5′ wing segment and the 3′ wing segment and wherein each nucleoside of each wing segment comprises a modified sugar.

[0198] In any of the foregoing methods or uses, the DGAT2 specific inhibitor can be a compound comprising or consisting of a modified oligonucleotide consisting of 10 to 30 linked nucleosides having a nucleobase sequence comprising any one of SEQ ID NOs: 16-4679, wherein the modified oligonucleotide comprises:
[0199] a gap segment consisting of linked 2′-deoxynucleosides;
[0200] a 5′ wing segment consisting of linked nucleosides; and
[0201] a 3′ wing segment consisting of linked nucleosides;
[0202] wherein the gap segment is positioned between the 5′ wing segment and the 3′ wing segment and wherein each nucleoside of each wing segment comprises a modified sugar.

[0203] In any of the foregoing methods or uses, the DGAT2 specific inhibitor can be a compound comprising a conjugate group and a modified oligonucleotide consisting of 10 to 30 linked nucleosides having a nucleobase sequence comprising any one of SEQ ID NOs: 16-4679, wherein the modified oligonucleotide comprises:
[0204] a gap segment consisting of linked 2′-deoxynucleosides;
[0205] a 5′ wing segment consisting of linked nucleosides; and
[0206] a 3′ wing segment consisting of linked nucleosides;
[0207] wherein the gap segment is positioned between the 5′ wing segment and the 3′ wing segment and wherein each nucleoside of each wing segment comprises a modified sugar.

[0208] In any of the foregoing methods or uses, the DGAT2 specific inhibitor can be a compound comprising or consisting of a modified oligonucleotide consisting of 10 to 30 linked nucleosides having a nucleobase sequence comprising any one of SEQ ID NOs: 1423, 1371, 1415, 1849, 2959, 3292, 4198, or 4373, wherein the modified oligonucleotide comprises:
[0209] a gap segment consisting of linked 2′-deoxynucleosides;
[0210] a 5′ wing segment consisting of linked nucleosides; and
[0211] a 3′ wing segment consisting of linked nucleosides;
[0212] wherein the gap segment is positioned between the 5′ wing segment and the 3′ wing segment and wherein each nucleoside of each wing segment comprises a modified sugar.

[0213] In any of the foregoing methods or uses, the DGAT2 specific inhibitor can be a compound comprising or consisting of a modified oligonucleotide consisting of 16 to 30 linked nucleosides having a nucleobase sequence comprising the sequence recited in SEQ ID NO: 1423, wherein the modified oligonucleotide comprises:
[0214] a gap segment consisting of ten linked 2′-deoxynucleosides;
[0215] a 5′ wing segment consisting of five linked nucleosides; and
[0216] a 3′ wing segment consisting of five linked nucleosides;
[0217] wherein the gap segment is positioned between the 5′ wing segment and the 3′ wing segment;
[0218] wherein each nucleoside of each wing segment comprises a 2′MOE sugar; wherein each internucleoside linkage is a phosphorothioate linkage; and wherein each cytosine is a 5-methylcytosine.

[0219] In any of the foregoing methods or uses, the DGAT2 specific inhibitor can be a compound comprising or consisting of a modified oligonucleotide consisting of 20 linked nucleosides having a nucleobase sequence consisting of the sequence recited in SEQ ID NO: 1423, wherein the modified oligonucleotide comprises:
[0220] a gap segment consisting of ten linked 2′-deoxynucleosides;
[0221] a 5′ wing segment consisting of five linked nucleosides; and
[0222] a 3′ wing segment consisting of five linked nucleosides;
[0223] wherein the gap segment is positioned between the 5′ wing segment and the 3′ wing segment; wherein each nucleoside of each wing segment comprises a 2′MOE sugar; wherein each internucleoside linkage is a phosphorothioate linkage; and wherein each cytosine is a 5-methylcytosine.

[0224] In any of the foregoing methods or uses, the DGAT2 specific inhibitor can be a compound comprising a conjugate group and a modified oligonucleotide consisting of 20 linked nucleosides having a nucleobase sequence consisting of the sequence recited in SEQ ID NO: 1423, wherein the modified oligonucleotide comprises:
[0225] a gap segment consisting of ten linked 2′-deoxynucleosides;
[0226] a 5′ wing segment consisting of five linked nucleosides; and
[0227] a 3′ wing segment consisting of five linked nucleosides;
[0228] wherein the gap segment is positioned between the 5′ wing segment and the 3′ wing segment; wherein each nucleoside of each wing segment comprises a 2′MOE sugar; wherein each internucleoside linkage is a phosphorothioate linkage; and wherein each cytosine is a 5-methylcytosine.

[0229] In any of the foregoing methods or uses, the DGAT2 specific inhibitor can be a compound comprising or consisting of a modified oligonucleotide consisting of 16 to 30 linked nucleosides having a nucleobase sequence comprising the sequence recited in SEQ ID NO: 1371, wherein the modified oligonucleotide comprises:
[0230] a gap segment consisting of ten linked 2′-deoxynucleosides;
[0231] a 5′ wing segment consisting of five linked nucleosides; and
[0232] a 3′ wing segment consisting of five linked nucleosides;
[0233] wherein the gap segment is positioned between the 5′ wing segment and the 3′ wing segment;
[0234] wherein each nucleoside of each wing segment comprises a 2′MOE sugar; wherein each internucleoside linkage is a phosphorothioate linkage; and wherein each cytosine is a 5-methylcytosine.

[0235] In any of the foregoing methods or uses, the DGAT2 specific inhibitor can be a compound comprising or consisting of a modified oligonucleotide consisting of 20 linked nucleosides having a nucleobase sequence consisting of the sequence recited in SEQ ID NO: 1371, wherein the modified oligonucleotide comprises:
[0236] a gap segment consisting of ten linked 2′-deoxynucleosides;
[0237] a 5′ wing segment consisting of five linked nucleosides; and
[0238] a 3′ wing segment consisting of five linked nucleosides;
[0239] wherein the gap segment is positioned between the 5′ wing segment and the 3′ wing segment; wherein each nucleoside of each wing segment comprises a 2′MOE sugar; wherein each internucleoside linkage is a phosphorothioate linkage; and wherein each cytosine is a 5-methylcytosine.

[0240] In any of the foregoing methods or uses, the DGAT2 specific inhibitor can be a compound comprising or consisting of a modified oligonucleotide consisting of 16 to 30 linked nucleosides having a nucleobase sequence comprising the sequence recited in SEQ ID NO: 1415, wherein the modified oligonucleotide comprises:
[0241] a gap segment consisting of ten linked 2′-deoxynucleosides;
[0242] a 5′ wing segment consisting of five linked nucleosides; and
[0243] a 3′ wing segment consisting of five linked nucleosides;
   [0244] wherein the gap segment is positioned between the 5′ wing segment and the 3′ wing segment;
[0245] wherein each nucleoside of each wing segment comprises a 2′MOE sugar; wherein each internucleoside linkage is a phosphorothioate linkage; and wherein each cytosine is a 5-methylcytosine.

[0246] In any of the foregoing methods or uses, the DGAT2 specific inhibitor can be a compound comprising or consisting of a modified oligonucleotide consisting of 20 linked nucleosides having a nucleobase sequence consisting of the sequence recited in SEQ ID NO: 1415, wherein the modified oligonucleotide comprises:
[0247] a gap segment consisting of ten linked 2′-deoxynucleosides;
[0248] a 5′ wing segment consisting of five linked nucleosides; and
[0249] a 3′ wing segment consisting of five linked nucleosides;
[0250] wherein the gap segment is positioned between the 5′ wing segment and the 3′ wing segment; wherein each nucleoside of each wing segment comprises a 2′MOE sugar; wherein each internucleoside linkage is a phosphorothioate linkage; and wherein each cytosine is a 5-methylcytosine.

[0251] In any of the foregoing methods or uses, the DGAT2 specific inhibitor can be a compound comprising or consisting of a modified oligonucleotide consisting of 16 to 30 linked nucleosides having a nucleobase sequence comprising the sequence recited in SEQ ID NO: 1849, wherein the modified oligonucleotide comprises:
[0252] a gap segment consisting of ten linked 2′-deoxynucleosides;
[0253] a 5′ wing segment consisting of five linked nucleosides; and
[0254] a 3′ wing segment consisting of five linked nucleosides;
[0255] wherein the gap segment is positioned between the 5′ wing segment and the 3′ wing segment;
[0256] wherein each nucleoside of each wing segment comprises a 2′MOE sugar; wherein each internucleoside linkage is a phosphorothioate linkage; and wherein each cytosine is a 5-methylcytosine.

[0257] In any of the foregoing methods or uses, the DGAT2 specific inhibitor can be a compound comprising or consisting of a modified oligonucleotide consisting of 20 linked nucleosides having a nucleobase sequence consisting of the sequence recited in SEQ ID NO: 1849, wherein the modified oligonucleotide comprises:
[0258] a gap segment consisting of ten linked 2′-deoxynucleosides;
[0259] a 5′ wing segment consisting of five linked nucleosides; and
[0260] a 3′ wing segment consisting of five linked nucleosides;
[0261] wherein the gap segment is positioned between the 5′ wing segment and the 3′ wing segment; wherein each nucleoside of each wing segment comprises a 2′MOE sugar; wherein each internucleoside linkage is a phosphorothioate linkage; and wherein each cytosine is a 5-methylcytosine.

[0262] In any of the foregoing methods or uses, the DGAT2 specific inhibitor can be a compound comprising or consisting of a modified oligonucleotide consisting of 16 to 30 linked nucleosides having a nucleobase sequence comprising the sequence recited in SEQ ID NO: 2959, wherein the modified oligonucleotide comprises:
[0263] a gap segment consisting of ten linked 2′-deoxynucleosides;
[0264] a 5′ wing segment consisting of five linked nucleosides; and
[0265] a 3′ wing segment consisting of five linked nucleosides;
[0266] wherein the gap segment is positioned between the 5′ wing segment and the 3′ wing segment;
[0267] wherein each nucleoside of each wing segment comprises a 2′MOE sugar; wherein each internucleoside linkage is a phosphorothioate linkage; and wherein each cytosine is a 5-methylcytosine.

[0268] In any of the foregoing methods or uses, the DGAT2 specific inhibitor can be a compound comprising or consisting of a modified oligonucleotide consisting of 20 linked nucleosides having a nucleobase sequence consisting of the sequence recited in SEQ ID NO: 2959, wherein the modified oligonucleotide comprises:
[0269] a gap segment consisting of ten linked 2′-deoxynucleosides;
[0270] a 5′ wing segment consisting of five linked nucleosides; and
[0271] a 3′ wing segment consisting of five linked nucleosides;
[0272] wherein the gap segment is positioned between the 5′ wing segment and the 3′ wing segment; wherein each nucleoside of each wing segment comprises a 2′MOE sugar; wherein each internucleoside linkage is a phosphorothioate linkage; and wherein each cytosine is a 5-methylcytosine.

[0273] In any of the foregoing methods or uses, the DGAT2 specific inhibitor can be a compound comprising or consisting of a modified oligonucleotide consisting of 16 to 30 linked nucleosides having a nucleobase sequence comprising the sequence recited in SEQ ID NO: 3292, wherein the modified oligonucleotide comprises:
[0274] a gap segment consisting of ten linked 2′-deoxynucleosides;
[0275] a 5′ wing segment consisting of five linked nucleosides; and a 3′ wing segment consisting of five linked nucleosides;
[0276] wherein the gap segment is positioned between the 5′ wing segment and the 3′ wing segment;
[0277] wherein each nucleoside of each wing segment comprises a 2′MOE sugar; wherein each internucleoside linkage is a phosphorothioate linkage; and wherein each cytosine is a 5-methylcytosine.

[0278] In any of the foregoing methods or uses, the DGAT2 specific inhibitor can be a compound comprising or consisting of a modified oligonucleotide consisting of 20 linked nucleosides having a nucleobase sequence consisting of the sequence recited in SEQ ID NO: 3292, wherein the modified oligonucleotide comprises:
[0279] a gap segment consisting of ten linked 2′-deoxynucleosides;
[0280] a 5′ wing segment consisting of five linked nucleosides; and
[0281] a 3′ wing segment consisting of five linked nucleosides;
[0282] wherein the gap segment is positioned between the 5′ wing segment and the 3′ wing segment; wherein each nucleoside of each wing segment comprises a 2′MOE sugar; wherein each internucleoside linkage is a phosphorothioate linkage; and wherein each cytosine is a 5-methylcytosine.

[0283] In any of the foregoing methods or uses, the DGAT2 specific inhibitor can be a compound comprising or consisting of a modified oligonucleotide consisting of 14 to 30 linked nucleosides having a nucleobase sequence comprising the sequence recited in SEQ ID NO: 4198, wherein the modified oligonucleotide comprises:
[0284] a gap segment consisting of ten linked 2′-deoxynucleosides;
[0285] a 5′ wing segment consisting of three linked nucleosides; and
[0286] a 3′ wing segment consisting of four linked nucleosides;
[0287] wherein the gap segment is positioned between the 5′ wing segment and the 3′ wing segment;
[0288] wherein each nucleoside of each wing segment comprises a 2′MOE sugar; wherein each internucleoside linkage is a phosphorothioate linkage; and wherein each cytosine is a 5-methylcytosine.

[0289] In any of the foregoing methods or uses, the DGAT2 specific inhibitor can be a compound comprising or consisting of a modified oligonucleotide consisting of 17 linked nucleosides having a nucleobase sequence consisting of the sequence recited in SEQ ID NO: 4198, wherein the modified oligonucleotide comprises:
[0290] a gap segment consisting of ten linked 2′-deoxynucleosides;
[0291] a 5′ wing segment consisting of three linked nucleosides; and
[0292] a 3′ wing segment consisting of four linked nucleosides;
[0293] wherein the gap segment is positioned between the 5′ wing segment and the 3′ wing segment; wherein each nucleoside of each wing segment comprises a 2′MOE sugar; wherein each internucleoside linkage is a phosphorothioate linkage; and wherein each cytosine is a 5-methylcytosine.

[0294] In any of the foregoing methods or uses, the DGAT2 specific inhibitor can be a compound comprising or consisting of a modified oligonucleotide consisting of 14 to 30 linked nucleosides having a nucleobase sequence comprising the sequence recited in SEQ ID NO: 4373, wherein the modified oligonucleotide comprises:
[0295] a gap segment consisting of ten linked 2′-deoxynucleosides;
[0296] a 5′ wing segment consisting of three linked nucleosides; and
[0297] a 3′ wing segment consisting of four linked nucleosides;
[0298] wherein the gap segment is positioned between the 5′ wing segment and the 3′ wing segment;
[0299] wherein each nucleoside of each wing segment comprises a 2′MOE sugar; wherein each internucleoside linkage is a phosphorothioate linkage; and wherein each cytosine is a 5-methylcytosine.

[0300] In any of the foregoing methods or uses, the DGAT2 specific inhibitor can be a compound comprising or consisting of a modified oligonucleotide consisting of 17 linked nucleosides having a nucleobase sequence consisting of the sequence recited in SEQ ID NO: 4373, wherein the modified oligonucleotide comprises:
[0301] a gap segment consisting of ten linked 2′-deoxynucleosides;
[0302] a 5′ wing segment consisting of three linked nucleosides; and
[0303] a 3′ wing segment consisting of four linked nucleosides;
[0304] wherein the gap segment is positioned between the 5′ wing segment and the 3′ wing segment; wherein each nucleoside of each wing segment comprises a 2′MOE sugar; wherein each internucleoside linkage is a phosphorothioate linkage; and wherein each cytosine is a 5-methylcytosine.

[0305] In any of the foregoing methods or uses, the DGAT2 specific inhibitor is administered subcutaneously, such as by subcutaneous injection.

### Antisense Compounds

[0306] Oligomeric compounds include, but are not limited to, oligonucleotides, oligonucleosides, oligonucleotide analogs, antisense compounds, antisense oligonucleotides, and siRNAs. An oligomeric compound may be “antisense” to a target nucleic acid, meaning that is capable of undergoing hybridization to a target nucleic acid through hydrogen bonding.

[0307] In certain embodiments, an antisense compound has a nucleobase sequence that, when written in the 5′ to 3′ direction, comprises the reverse complement of the target segment of a target nucleic acid to which it is targeted.

[0308] In certain embodiments, an antisense compound is 10 to 30 subunits in length. In certain embodiments, an antisense compound is 12 to 30 subunits in length. In certain embodiments, an antisense compound is 12 to 22 subunits in length. In certain embodiments, an antisense compound is 14 to 30 subunits in length. In certain embodiments, an antisense compound is 14 to 20 subunits in length. In certain embodiments, an antisense compound is 15 to 30 subunits in length. In certain embodiments, an antisense compound is 15 to 20 subunits in length. In certain embodiments, an antisense compound is 16 to 30 subunits in length. In certain embodiments, an antisense compound is 16 to 20 subunits in length. In certain embodiments, an antisense compound is 17 to 30 subunits in length. In certain embodiments, an antisense compound is 17 to 20 subunits in length. In certain embodiments, an antisense compound is 18 to 30 subunits in length. In certain embodiments, an antisense compound is 18 to 21 subunits in length. In certain embodiments, an antisense compound is 18 to 20 subunits in length. In certain embodiments, an antisense compound is 20 to 30 subunits in length. In other words, such antisense compounds are from 12 to 30 linked subunits, 14 to 30 linked subunits, 14 to 20 subunits, 15 to 30 subunits, 15 to 20 subunits, 16 to 30 subunits, 16 to 20 subunits, 17 to 30 subunits, 17 to 20 subunits, 18 to 30 subunits, 18 to 20 subunits, 18 to 21 subunits, 20 to 30 subunits, or 12 to 22 linked subunits, respectively. In certain embodiments, an antisense compound is 14 subunits in length. In certain embodiments, an antisense compound is 16 subunits in length. In certain embodiments, an antisense compound is 17 subunits in length. In certain embodiments, an antisense compound is 18 subunits in length. In certain embodiments, an antisense compound is 19 subunits in length. In certain embodiments, an antisense compound is 20 subunits in length. In other embodiments, the antisense compound is 8 to 80, 12 to 50, 13 to 30, 13 to 50, 14 to 30, 14 to 50, 15 to 30, 15 to 50, 16 to 30, 16 to 50, 17 to 30, 17 to 50, 18 to 22, 18 to 24, 18 to 30, 18 to 50, 19 to 22, 19 to 30, 19 to 50, or 20 to 30 linked subunits. In certain such embodiments, the antisense compounds are 8, 9, 10, 11, 12, 13, 14, 15, 16, 17, 18, 19, 20, 21, 22, 23, 24, 25, 26, 27, 28, 29, 30, 31, 32, 33, 34, 35, 36, 37, 38, 39, 40, 41, 42, 43, 44, 45, 46, 47, 48, 49, 50, 51, 52, 53, 54, 55, 56, 57, 58, 59, 60, 61, 62, 63, 64, 65, 66, 67, 68, 69, 70, 71, 72, 73, 74, 75, 76, 77, 78, 79, or 80 linked subunits in length, or a range defined by any two of the above values. In some embodiments the antisense compound is an antisense oligonucleotide, and the linked subunits are nucleotides, nucleosides, or nucleobases.

[0309] In certain embodiments, the antisense compound or oligomeric compound may further comprise additional features or elements, such as a conjugate group, that are attached to the oligonucleotide. In embodiments where a conjugate group comprises a nucleoside (i.e. a nucleoside that links the conjugate group to the oligonucleotide), the nucleoside of the conjugate group is not counted in the length of the oligonucleotide.

[0310] In certain embodiments antisense oligonucleotides may be shortened or truncated. For example, a single nucleoside may be deleted from the 5′ end (5′ truncation), or alternatively from the 3′ end (3′ truncation). A shortened or truncated antisense compound targeted to an DGAT2 nucleic acid may have two subunits deleted from the 5′ end, or alternatively may have two subunits deleted from the 3′ end, of the antisense compound. Alternatively, the deleted nucleosides may be dispersed throughout the antisense compound, for example, in an antisense compound having one nucleoside deleted from the 5′ end and one nucleoside deleted from the 3′ end.

[0311] When a single additional subunit is present in a lengthened antisense compound, the additional subunit may be located at the 5′ or 3′ end of the antisense compound. When two or more additional subunits are present, the added subunits may be adjacent to each other, for example, in an antisense compound having two subunits added to the 5′ end (5′ addition), or alternatively to the 3′ end (3′ addition), of the antisense compound. Alternatively, the added subunits may be dispersed throughout the antisense compound, for example, in an antisense compound having one subunit added to the 5′ end and one subunit added to the 3′ end.

[0312] It is possible to increase or decrease the length of an antisense compound, such as an antisense oligonucleotide, and/or introduce mismatch bases without eliminating activity (Woolf et al. (Proc. Natl. Acad. Sci. USA 89:7305-7309, 1992; Gautschi et al. J. Natl. Cancer Inst. 93:463-471, March 2001; Maher and Dolnick Nuc. Acid. Res. 16:3341-3358,1988). However, seemingly small changes in oligonucleotide sequence, chemistry and motif can make large differences in one or more of the many properties required for clinical development (Seth et al. J. Med. Chem. 2009, 52, 10; Egli et al. J. Am. Chem. Soc. 2011, 133, 16642).

[0313] In certain embodiments, antisense compounds are single-stranded, consisting of one oligomeric compound. The oligonucleotide of such single-stranded antisense compounds is an antisense oligonucleotide. In certain embodiments, the antisense oligonucleotide of a single-stranded antisense compound is modified. In certain embodiments, the oligonucleotide of a single-stranded antisense compound or oligomeric compound comprises a self-complementary nucleobase sequence. In certain embodiments, antisense compounds are double-stranded, comprising two oligomeric compounds that form a duplex. In certain such embodiments, one oligomeric compound of a double-stranded antisense compound comprises one or more conjugate groups. In certain embodiments, each oligomeric compound of a double-stranded antisense compound comprises one or more conjugate groups. In certain embodiments, each oligonucleotide of a double-stranded antisense compound is a modified oligonucleotide. In certain embodiments, one oligonucleotide of a double-stranded antisense compound is a modified oligonucleotide. In certain embodiments, one oligonucleotide of a double-stranded antisense compound is an antisense oligonucleotide. In certain such embodiments, the antisense oligonucleotide is a modified oligonucleotide. Examples of single-stranded and double-stranded antisense compounds include but are not limited to antisense oligonucleotides, siRNAs, microRNA targeting oligonucleotides, and single-stranded RNAi compounds, such as small hairpin RNAs (shRNAs), single-stranded siRNAs (ssRNAs), and microRNA mimics.

[0314] In certain embodiments, antisense compounds are interfering RNA compounds (RNAi), which include double-stranded RNA compounds (also referred to as short-interfering RNA or siRNA) and single-stranded RNAi compounds (or ssRNA). Such compounds work at least in part through the RISC pathway to degrade and/or sequester a target nucleic acid (thus, include microRNA/microRNA-mimic compounds). As used herein, the term siRNA is meant to be equivalent to other terms used to describe nucleic acid molecules that are capable of mediating sequence specific RNAi, for example short interfering RNA (siRNA), double-stranded RNA (dsRNA), micro-RNA (miRNA), short hairpin RNA (shRNA), short interfering oligonucleotide, short interfering nucleic acid, short interfering modified oligonucleotide, chemically modified siRNA, post-transcriptional gene silencing RNA (ptgsRNA), and others. In addition, as used herein, the term RNAi is meant to be equivalent to other terms used to describe sequence specific RNA interference, such as post transcriptional gene silencing, translational inhibition, or epigenetics.

[0315] In certain embodiments, a double-stranded compound can comprise any of the oligonucleotide sequences targeted to DGAT2 described herein. In certain embodiments, a double-stranded compound comprises a first strand comprising at least an 8, 9, 10, 11, 12, 13, 14, 15, 16, 17, 18, 19, or 20 contiguous nucleobase portion of any one of SEQ ID NOs: 16-4679 and a second strand. In certain embodiments, a double-stranded compound comprises a first strand comprising the nucleobase sequence of any one of SEQ ID NOs: 16-4679 and a second strand. In certain embodiments, the double-stranded compound comprises ribonucleotides in which the first strand has uracil (U) in place of thymine (T) in any one of SEQ ID NOs: 16-4679. In certain embodiments, a double-stranded compound comprises (i) a first strand comprising a nucleobase sequence complementary to the site on DGAT2 to which any of SEQ ID NOs: 16-4679 is targeted, and (ii) a second strand. In certain embodiments, the double-stranded compound comprises one or more modified nucleotides in which the 2′ position in the sugar contains a halogen (such as fluorine group; 2′-F) or contains an alkoxy group (such as a methoxy group; 2′-OMe). In certain embodiments, the double-stranded compound comprises at least one 2′-F sugar modification and at least one 2′-OMe sugar modification. In certain embodiments, the at least one 2′-F sugar modification and at least one 2′-OMe sugar modification are arranged in an alternating pattern for at least 2, 3, 4, 5, 6, 7, 8, 9, 10, 11, 12, 13, 14, 15, 16, 17, 18, 19, or 20 contiguous nucleobases along a strand of the dsRNA compound. In certain embodiments, the double-stranded compound comprises one or more linkages between adjacent nucleotides other than a naturally-occurring phosphodiester linkage. Examples of such linkages include phosphoramide, phosphorothioate, and phosphorodithioate linkages. The double-stranded compounds may also be chemically modified nucleic acid molecules as taught in U.S. Pat. No. 6,673,661. In other embodiments, the dsRNA contains one or two capped strands, as disclosed, for example, by WO 00/63364, filed Apr. 19, 2000. In certain embodiments, the first strand of the double-stranded compound is an siRNA guide strand and the second strand of the double-stranded compound is an siRNA passenger strand. In certain embodiments, the second strand of the double-stranded compound is complementary to the first strand. In certain embodiments, each strand of the double-stranded compound consists of 16, 17, 18, 19, 20, 21, 22, or 23 linked nucleosides. In certain embodiments, the first or second strand of the double-stranded compound can comprise a conjugate group.

[0316] In certain embodiments, a single-stranded RNAi (ssRNAi) compound can comprise any of the oligonucleotide sequences targeted to DGAT2 described herein. In certain embodiments, an ssRNAi compound comprises at least an 8, 9, 10, 11, 12, 13, 14, 15, 16, 17, 18, 19, or 20 contiguous nucleobase portion of any one of SEQ ID NOs: 16-4679. In certain embodiments, an ssRNAi compound comprises the nucleobase sequence of any one of SEQ ID NOs: 16-4679. In certain embodiments, the ssRNAi compound comprises ribonucleotides in which uracil (U) is in place of thymine (T) in any one of SEQ ID NOs: 16-4679. In certain embodiments, an ssRNAi compound comprises a nucleobase sequence complementary to the site on DGAT2 to which any of SEQ ID NOs: 16-4679 is targeted. In certain embodiments, an ssRNAi compound comprises one or more modified nucleotides in which the 2′ position in the sugar contains a halogen (such as fluorine group; 2′-F) or contains an alkoxy group (such as a methoxy group; 2′-OMe). In certain embodiments, an ssRNAi compound comprises at least one 2′-F sugar modification and at least one 2′-OMe sugar modification. In certain embodiments, the at least one 2′-F sugar modification and at least one 2′-OMe sugar modification are arranged in an alternating pattern for at least 2, 3, 4, 5, 6, 7, 8, 9, 10, 11, 12, 13, 14, 15, 16, 17, 18, 19, or 20 contiguous nucleobases along a strand of the ssRNAi compound. In certain embodiments, the ssRNAi compound comprises one or more linkages between adjacent nucleotides other than a naturally-occurring phosphodiester linkage. Examples of such linkages include phosphoramide, phosphorothioate, and phosphorodithioate linkages. The ssRNAi compounds may also be chemically modified nucleic acid molecules as taught in U.S. Pat. No. 6,673,661. In other embodiments, the ssRNAi contains a capped strand, as disclosed, for example, by WO 00/63364, filed Apr. 19, 2000. In certain embodiments, the ssRNAi compound consists of 16, 17, 18, 19, 20, 21, 22, or 23 linked nucleosides. In certain embodiments, the ssRNAi compound can comprise a conjugate group.

[0317] In certain embodiments, antisense compounds comprise modified oligonucleotides. Certain modified oligonucleotides have one or more asymmetric center and thus give rise to enantiomers, diastereomers, and other stereoisomeric configurations that may be defined, in terms of absolute stereochemistry, as (R) or(S), as α or β such as for sugar anomers, or as (D) or (L) such as for amino acids etc. Included in the modified oligonucleotides provided herein are all such possible isomers, including their racemic and optically pure forms, unless specified otherwise. Likewise, all cis- and trans-isomers and tautomeric forms are also included.

[0318] In certain embodiments, antisense compounds and oligomeric compounds described herein comprise modified oligonucleotides. Such modified oligonucleotides may contain any combination of the modified sugar moieties, modified nucleobases, modified internucleoside linkages, motifs, and/or lengths described herein.

### Certain Antisense Compound Mechanisms

[0319] In certain embodiments, antisense compounds are capable of hybridizing to a target nucleic acid, resulting in at least one antisense activity. In certain embodiments, antisense compounds specifically affect one or more target nucleic acid. Such specific antisense compounds comprises a nucleobase sequence that hybridizes to one or more target nucleic acid, resulting in one or more desired antisense activity and does not hybridize to one or more non-target nucleic acid or does not hybridize to one or more non-target nucleic acid in such a way that results in an undesired antisense activity.

[0320] In certain antisense activities, hybridization of an antisense compound to a target nucleic acid results in recruitment of a protein that cleaves the target nucleic acid. For example, certain antisense compounds result in RNase H mediated cleavage of the target nucleic acid. RNase His a cellular endonuclease that cleaves the RNA strand of an RNA:DNA duplex. The DNA in such an RNA:DNA duplex need not be unmodified DNA. In certain embodiments, the invention provides antisense compounds that are sufficiently “DNA-like” to elicit RNase H activity. Further, in certain embodiments, one or more non-DNA-like nucleoside in the gap of a gapmer is tolerated.

[0321] In certain antisense activities, an antisense compound or a portion of an antisense compound is loaded into an RNA-induced silencing complex (RISC), ultimately resulting in cleavage of the target nucleic acid. For example, certain antisense compounds result in cleavage of the target nucleic acid by Argonaute. In certain embodiments, antisense compounds that are loaded into RISC are RNAi compounds.

[0322] In certain embodiments, hybridization of an antisense compound to a target nucleic acid dose not result in recruitment of a protein that cleaves that target nucleic acid. In certain such embodiments, hybridization of the antisense compound to the target nucleic acid results in alteration of splicing of the target nucleic acid. In certain embodiments, hybridization of an antisense compound to a target nucleic acid results in inhibition of a binding interaction between the target nucleic acid and a protein or other nucleic acid. In certain such embodiments, hybridization of an antisense compound to a target nucleic acid results in alteration of translation of the target nucleic acid.

[0323] Antisense activities may be observed directly or indirectly. In certain embodiments, observation or detection of an antisense activity involves observation or detection of a change in an amount of a target nucleic acid or protein encoded by such target nucleic acid, a change in the ratio of splice variants of a nucleic acid or protein, and/or a phenotypic change in a cell or animal.

[0324] In certain embodiments, modified oligonucleotides having a gapmer sugar motif described herein have desirable properties compared to non-gapmer oligonucleotides or to gapmers having other sugar motifs. In certain circumstances, it is desirable to identify motifs resulting in a favorable combination of potent antisense activity and relatively low toxicity. In certain embodiments, compounds of the present invention have a favorable therapeutic index (measure of activity divided by measure of toxicity).

### Target Nucleic Acids, Target Regions and Nucleotide Sequences

[0325] In certain embodiments, antisense compounds comprise or consist of an oligonucleotide comprising a region that is complementary to a target nucleic acid. In certain embodiments, the target nucleic acid is an endogenous RNA molecule. In certain embodiments, the target nucleic acid encodes a protein. In certain such embodiments, the target nucleic acid is selected from: an mRNA and a pre-mRNA, including intronic, exonic and untranslated regions. In certain embodiments, the target RNA is an mRNA. In certain embodiments, the target nucleic acid is a pre-mRNA. In certain such embodiments, the target region is entirely within an intron. In certain embodiments, the target region spans an intron/exon junction. In certain embodiments, the target region is at least 50% within an intron.

[0326] Nucleotide sequences that encode DGAT2 include, without limitation, the following: Ref Seq No. NM_032564.3 (incorporated herein by reference; designated herein as SEQ ID NO: 1), nucleotides 5669186 to 5712008 of Ref Seq No. NT_033927.5 (incorporated herein by reference; designated herein as SEQ ID NO: 2), nucleotides 20780400 to 20823450 of Ref Seq No. NT_167190.1 (incorporated herein by reference; designated herein as SEQ ID NO: 4878), Ref Seq No. AK091870.1 (incorporated herein by reference; designated herein as SEQ ID NO: 4879), and nucleotides 1232000 to 1268000 of Ref Seq No. NW_001100387.1 (incorporated herein by reference; designated herein as SEQ ID NO: 3).

### Hybridization

[0327] In some embodiments, hybridization occurs between an antisense compound disclosed herein and a DGAT2 nucleic acid. The most common mechanism of hybridization involves hydrogen bonding (e.g., Watson-Crick, Hoogsteen or reversed Hoogsteen hydrogen bonding) between complementary nucleobases of the nucleic acid molecules.

[0328] Hybridization can occur under varying conditions. Hybridization conditions are sequence-dependent and are determined by the nature and composition of the nucleic acid molecules to be hybridized.

[0329] Methods of determining whether a sequence is specifically hybridizable to a target nucleic acid are well known in the art. In certain embodiments, the antisense compounds provided herein are specifically hybridizable with a DGAT2 nucleic acid.

### Complementarity

[0330] An oligonucleotide is said to be complementary to another nucleic acid when the nucleobase sequence of such oligonucleotide or one or more regions thereof matches the nucleobase sequence of another oligonucleotide or nucleic acid or one or more regions thereof when the two nucleobase sequences are aligned in opposing directions. Nucleobase matches or complementary nucleobases, as described herein, are limited to adenine (A) and thymine (T), adenine (A) and uracil (U), cytosine (C) and guanine (G), and 5-methyl cytosine (mC) and guanine (G) unless otherwise specified. Complementary oligonucleotides and/or nucleic acids need not have nucleobase complementarity at each nucleoside and may include one or more nucleobase mismatches. An oligonucleotide is fully complementary or 100% complementary when such oligonucleotides have nucleobase matches at each nucleoside without any nucleobase mismatches.

[0331] Non-complementary nucleobases between an antisense compound and a DGAT2 nucleic acid may be tolerated provided that the antisense compound remains able to specifically hybridize to a target nucleic acid. Moreover, an antisense compound may hybridize over one or more segments of a DGAT2 nucleic acid such that intervening or adjacent segments are not involved in the hybridization event (e.g., a loop structure, mismatch or hairpin structure).

[0332] In certain embodiments, the antisense compounds provided herein, or a specified portion thereof, are, or are at least, 70%, 80%, 85%, 86%, 87%, 88%, 89%, 90%, 91%, 92%, 93%, 94%, 95%, 96%, 97%, 98%, 99%, or 100% complementary to a DGAT2 nucleic acid, a target region, target segment, or specified portion thereof. In certain such embodiments, the region of full complementarity is from 6 to 20 nucleobases in length. In certain such embodiments, the region of full complementarity is from 10 to 18 nucleobases in length. In certain such embodiments, the region of full complementarity is from 18 to 20 nucleobases in length. Percent complementarity of an antisense compound with a target nucleic acid can be determined using routine methods.

[0333] For example, an antisense compound in which 18 of 20 nucleobases of the antisense compound are complementary to a target region, and would therefore specifically hybridize, would represent 90 percent complementarity. In this example, the remaining noncomplementary nucleobases may be clustered or interspersed with complementary nucleobases and need not be contiguous to each other or to complementary nucleobases. As such, an antisense compound which is 18 nucleobases in length having four noncomplementary nucleobases which are flanked by two regions of complete complementarity with the target nucleic acid would have 77.8% overall complementarity with the target nucleic acid and would thus fall within the scope of the present invention. Percent complementarity of an antisense compound with a region of a target nucleic acid can be determined routinely using BLAST programs (basic local alignment search tools) and PowerBLAST programs known in the art (Altschul et al., J. Mol. Biol., 1990, 215, 403 410; Zhang and Madden, Genome Res., 1997, 7, 649 656). Percent homology, sequence identity or complementarity, can be determined by, for example, the Gap program (Wisconsin Sequence Analysis Package, Version 8 for Unix, Genetics Computer Group, University Research Park, Madison Wis.), using default settings, which uses the algorithm of Smith and Waterman (Adv. Appl. Math., 1981, 2, 482 489).

[0334] In certain embodiments, the antisense compounds provided herein, or specified portions thereof, are fully complementary (i.e. 100% complementary) to a target nucleic acid, or specified portion thereof. For example, an antisense compound may be fully complementary to a DGAT2 nucleic acid, or a target region, or a target segment or target sequence thereof. As used herein, “fully complementary” means each nucleobase of an antisense compound is capable of precise base pairing with the corresponding nucleobases of a target nucleic acid. For example, a 20 nucleobase antisense compound is fully complementary to a target sequence that is 400 nucleobases long, so long as there is a corresponding 20 nucleobase portion of the target nucleic acid that is fully complementary to the antisense compound. Fully complementary can also be used in reference to a specified portion of the first and/or the second nucleic acid. For example, a 20 nucleobase portion of a 30 nucleobase antisense compound can be “fully complementary” to a target sequence that is 400 nucleobases long. The 20 nucleobase portion of the 30 nucleobase oligonucleotide is fully complementary to the target sequence if the target sequence has a corresponding 20 nucleobase portion wherein each nucleobase is complementary to the 20 nucleobase portion of the antisense compound. At the same time, the entire 30 nucleobase antisense compound may or may not be fully complementary to the target sequence, depending on whether the remaining 10 nucleobases of the antisense compound are also complementary to the target sequence.

[0335] In certain embodiments, antisense compounds comprise one or more mismatched nucleobases relative to the target nucleic acid. In certain such embodiments, antisense activity against the target is reduced by such mismatch, but activity against a non-target is reduced by a greater amount. Thus, in certain such embodiments selectivity of the antisense compound is improved. In certain embodiments, the mismatch is specifically positioned within an oligonucleotide having a gapmer motif. In certain such embodiments, the mismatch is at position 1, 2, 3, 4, 5, 6, 7, or 8 from the 5′-end of the gap region. In certain such embodiments, the mismatch is at position 9, 8, 7, 6, 5, 4, 3, 2, 1 from the 3′-end of the gap region. In certain such embodiments, the mismatch is at position 1, 2, 3, or 4 from the 5′-end of the wing region. In certain such embodiments, the mismatch is at position 4, 3, 2, or 1 from the 3′-end of the wing region.

[0336] The location of a non-complementary nucleobase may be at the 5′ end or 3′ end of the antisense compound. Alternatively, the non-complementary nucleobase or nucleobases may be at an internal position of the antisense compound. When two or more non-complementary nucleobases are present, they may be contiguous (i.e. linked) or non-contiguous. In one embodiment, a non-complementary nucleobase is located in the wing segment of a gapmer antisense oligonucleotide.

[0337] In certain embodiments, antisense compounds comprise one or more mismatched nucleobases relative to the target nucleic acid. In certain such embodiments, antisense activity against the target is reduced by such mismatch, but activity against a non-target is reduced by a greater amount. Thus, in certain such embodiments selectivity of the antisense compound is improved. In certain embodiments, the mismatch is specifically positioned within an oligonucleotide having a gapmer motif. In certain such embodiments, the mismatch is at position 1, 2, 3, 4, 5, 6, 7, or 8 from the 5′-end of the gap region. In certain such embodiments, the mismatch is at position 9, 8, 7, 6, 5, 4, 3, 2, 1 from the 3′-end of the gap region. In certain such embodiments, the mismatch is at position 1, 2, 3, or 4 from the 5′-end of the wing region. In certain such embodiments, the mismatch is at position 4, 3, 2, or 1 from the 3′-end of the wing region.

[0338] In certain embodiments, antisense compounds that are, or are up to 11, 12, 13, 14, 15, 16, 17, 18, 19, or 20 nucleobases in length comprise no more than 4, no more than 3, no more than 2, or no more than 1 non-complementary nucleobase(s) relative to a target nucleic acid, such as a DGAT2 nucleic acid, or specified portion thereof.

[0339] In certain embodiments, antisense compounds that are, or are up to 11, 12, 13, 14, 15, 16, 17, 18, 19, 20, 21, 22, 23, 24, 25, 26, 27, 28, 29, or 30 nucleobases in length comprise no more than 6, no more than 5, no more than 4, no more than 3, no more than 2, or no more than 1 non-complementary nucleobase(s) relative to a target nucleic acid, such as a DGAT2 nucleic acid, or specified portion thereof.

[0340] The antisense compounds provided also include those which are complementary to a portion of a target nucleic acid. As used herein, “portion” refers to a defined number of contiguous (i.e. linked) nucleobases within a region or segment of a target nucleic acid. A “portion” can also refer to a defined number of contiguous nucleobases of an antisense compound. In certain embodiments, the antisense compounds, are complementary to at least an 8 nucleobase portion of a target segment. In certain embodiments, the antisense compounds are complementary to at least a 9 nucleobase portion of a target segment. In certain embodiments, the antisense compounds are complementary to at least a 10 nucleobase portion of a target segment. In certain embodiments, the antisense compounds are complementary to at least an 11 nucleobase portion of a target segment. In certain embodiments, the antisense compounds are complementary to at least a 12 nucleobase portion of a target segment. In certain embodiments, the antisense compounds are complementary to at least a 13 nucleobase portion of a target segment. In certain embodiments, the antisense compounds are complementary to at least a 14 nucleobase portion of a target segment. In certain embodiments, the antisense compounds are complementary to at least a 15 nucleobase portion of a target segment. Also contemplated are antisense compounds that are complementary to at least a 9, 10, 11, 12, 13, 14, 15, 16, 17, 18, 19, 20, or more nucleobase portion of a target segment, or a range defined by any two of these values.

### Identity

[0341] The antisense compounds provided herein may also have a defined percent identity to a particular nucleotide sequence, SEQ ID NO, or compound represented by a specific Isis number, or portion thereof. As used herein, an antisense compound is identical to the sequence disclosed herein if it has the same nucleobase pairing ability. For example, a RNA which contains uracil in place of thymidine in a disclosed DNA sequence would be considered identical to the DNA sequence since both uracil and thymidine pair with adenine. Shortened and lengthened versions of the antisense compounds described herein as well as compounds having non-identical bases relative to the antisense compounds provided herein also are contemplated. The non-identical bases may be adjacent to each other or dispersed throughout the antisense compound. Percent identity of an antisense compound is calculated according to the number of bases that have identical base pairing relative to the sequence to which it is being compared.

[0342] In certain embodiments, the antisense compounds, or portions thereof, are, or are at least, 70%, 75%, 80%, 85%, 90%, 91%, 92%, 93%, 94%, 95%, 96%, 97%, 98%, 99% or 100% identical to one or more of the antisense compounds or SEQ ID NOs, or a portion thereof, disclosed herein.

[0343] In certain embodiments, a portion of the antisense compound is compared to an equal length portion of the target nucleic acid. In certain embodiments, an 8, 9, 10, 11, 12, 13, 14, 15, 16, 17, 18, 19, 20, 21, 22, 23, 24, or 25 nucleobase portion is compared to an equal length portion of the target nucleic acid.

[0344] In certain embodiments, a portion of the antisense oligonucleotide is compared to an equal length portion of the target nucleic acid. In certain embodiments, an 8, 9, 10, 11, 12, 13, 14, 15, 16, 17, 18, 19, 20, 21, 22, 23, 24, or 25 nucleobase portion is compared to an equal length portion of the target nucleic acid.

### Modifications

[0345] Modifications to antisense compounds encompass substitutions or changes to internucleoside linkages, sugar moieties, or nucleobases. Modified antisense compounds are often preferred over native forms because of desirable properties such as, for example, enhanced cellular uptake, enhanced affinity for nucleic acid target, increased stability in the presence of nucleases, or increased inhibitory activity.

[0346] Chemically modified nucleosides may also be employed to increase the binding affinity of a shortened or truncated antisense oligonucleotide for its target nucleic acid. Consequently, comparable results can often be obtained with shorter antisense compounds that have such chemically modified nucleosides.

### Modified Internucleoside Linkages

[0347] The naturally occurring internucleoside linkage of RNA and DNA is a 3′ to 5′ phosphodiester linkage. Antisense compounds having one or more modified, i.e. non-naturally occurring, internucleoside linkages are often selected over antisense compounds having naturally occurring internucleoside linkages because of desirable properties such as, for example, enhanced cellular uptake, enhanced affinity for target nucleic acids, and increased stability in the presence of nucleases.

[0348] Oligonucleotides having modified internucleoside linkages include internucleoside linkages that retain a phosphorus atom as well as internucleoside linkages that do not have a phosphorus atom. Representative phosphorus containing internucleoside linkages include, but are not limited to, phosphodiesters, phosphotriesters, methylphosphonates, phosphoramidate, and phosphorothioates. Methods of preparation of phosphorous-containing and non-phosphorous-containing linkages are well known.

[0349] In certain embodiments, nucleosides of modified oligonucleotides may be linked together using any internucleoside linkage. The two main classes of internucleoside linking groups are defined by the presence or absence of a phosphorus atom. Representative phosphorus-containing internucleoside linkages include but are not limited to phosphates, which contain a phosphodiester bond (“P═O”)(also referred to as unmodified or naturally occurring linkages), phosphotriesters, methylphosphonates, phosphoramidates, and phosphorothioates (“P═S”), and phosphorodithioates (“HS-P═S”). Representative non-phosphorus containing internucleoside linking groups include but are not limited to methylenemethylimino (—CH₂—N(CH₃)—O—CH₂—), thiodiester (—O—C(═O)—S—), thionocarbamate (—O—C(═O)(NH)—S—); siloxane (—O—SiH₂—O—); and N,N′-dimethylhydrazine (—CH₂—N(CH₃)—N(CH₃)—). Modified internucleoside linkages, compared to naturally occurring phosphate linkages, can be used to alter, typically increase, nuclease resistance of the oligonucleotide. In certain embodiments, internucleoside linkages having a chiral atom can be prepared as a racemic mixture, or as separate enantiomers. Representative chiral internucleoside linkages include but are not limited to alkylphosphonates and phosphorothioates. Methods of preparation of phosphorous-containing and non-phosphorous-containing internucleoside linkages are well known to those skilled in the art.

[0350] Neutral internucleoside linkages include, without limitation, phosphotriesters, methylphosphonates, MMI (3′-CH₂—N(CH₃)—O-5′), amide-3 (3′-CH₂—C(═O)—N(H)—5′), amide-4 (3′-CH₂—N(H)—C(═O)—5′), formacetyl (3′-O—CH₂—O-5′), methoxypropyl, and thioformacetal (3′-S—CH₂—O-5′). Further neutral internucleoside linkages include nonionic linkages comprising siloxane (dialkylsiloxane), carboxylate ester, carboxamide, sulfide, sulfonate ester and amides (See for example: Carbohydrate Modifications in Antisense Research; Y. S. Sanghvi and P. D. Cook, Eds., ACS Symposium Series 580; Chapters 3 and 4, 40-65). Further neutral internucleoside linkages include nonionic linkages comprising mixed N, O, S and CH₂ component parts.

[0351] In certain embodiments, antisense compounds targeted to a DGAT2 nucleic acid comprise one or more modified internucleoside linkages. In certain embodiments, the modified internucleoside linkages are phosphorothioate linkages. In certain embodiments, each internucleoside linkage of an antisense compound is a phosphorothioate internucleoside linkage.

[0352] In certain embodiments, oligonucleotides comprise modified internucleoside linkages arranged along the oligonucleotide or region thereof in a defined pattern or modified internucleoside linkage motif. In certain embodiments, internucleoside linkages are arranged in a gapped motif. In such embodiments, the internucleoside linkages in each of two wing regions are different from the internucleoside linkages in the gap region. In certain embodiments the internucleoside linkages in the wings are phosphodiester and the internucleoside linkages in the gap are phosphorothioate. The nucleoside motif is independently selected, so such oligonucleotides having a gapped internucleoside linkage motif may or may not have a gapped nucleoside motif and if it does have a gapped nucleoside motif, the wing and gap lengths may or may not be the same.

[0353] In certain embodiments, oligonucleotides comprise a region having an alternating internucleoside linkage motif. In certain embodiments, oligonucleotides of the present invention comprise a region of uniformly modified internucleoside linkages. In certain such embodiments, the oligonucleotide comprises a region that is uniformly linked by phosphorothioate internucleoside linkages. In certain embodiments, the oligonucleotide is uniformly linked by phosphorothioate. In certain embodiments, each internucleoside linkage of the oligonucleotide is selected from phosphodiester and phosphorothioate. In certain embodiments, each internucleoside linkage of the oligonucleotide is selected from phosphodiester and phosphorothioate and at least one internucleoside linkage is phosphorothioate.

[0354] In certain embodiments, the oligonucleotide comprises at least 6 phosphorothioate internucleoside linkages. In certain embodiments, the oligonucleotide comprises at least 8 phosphorothioate internucleoside linkages. In certain embodiments, the oligonucleotide comprises at least 10 phosphorothioate internucleoside linkages. In certain embodiments, the oligonucleotide comprises at least one block of at least 6 consecutive phosphorothioate internucleoside linkages. In certain embodiments, the oligonucleotide comprises at least one block of at least 8 consecutive phosphorothioate internucleoside linkages. In certain embodiments, the oligonucleotide comprises at least one block of at least 10 consecutive phosphorothioate internucleoside linkages. In certain embodiments, the oligonucleotide comprises at least block of at least one 12 consecutive phosphorothioate internucleoside linkages. In certain such embodiments, at least one such block is located at the 3′ end of the oligonucleotide. In certain such embodiments, at least one such block is located within 3 nucleosides of the 3′ end of the oligonucleotide.

[0355] In certain embodiments, oligonucleotides comprise one or more methylphosphonate linkages. In certain embodiments, oligonucleotides having a gapmer nucleoside motif comprise a linkage motif comprising all phosphorothioate linkages except for one or two methylphosphonate linkages. In certain embodiments, one methylphosphonate linkage is in the central gap of an oligonucleotide having a gapmer nucleoside motif.

[0356] In certain embodiments, it is desirable to arrange the number of phosphorothioate internucleoside linkages and phosphodiester internucleoside linkages to maintain nuclease resistance. In certain embodiments, it is desirable to arrange the number and position of phosphorothioate internucleoside linkages and the number and position of phosphodiester internucleoside linkages to maintain nuclease resistance. In certain embodiments, the number of phosphorothioate internucleoside linkages may be decreased and the number of phosphodiester internucleoside linkages may be increased. In certain embodiments, the number of phosphorothioate internucleoside linkages may be decreased and the number of phosphodiester internucleoside linkages may be increased while still maintaining nuclease resistance. In certain embodiments it is desirable to decrease the number of phosphorothioate internucleoside linkages while retaining nuclease resistance. In certain embodiments it is desirable to increase the number of phosphodiester internucleoside linkages while retaining nuclease resistance.

### Modified Sugar Moieties

[0357] Antisense compounds can optionally contain one or more nucleosides wherein the sugar group has been modified. Such sugar modified nucleosides may impart enhanced nuclease stability, increased binding affinity, or some other beneficial biological property to the antisense compounds.

[0358] In certain embodiments, modified oligonucleotides comprise one or more modified nucleosides comprising a modified sugar moiety. Such modified oligonucleotides comprising one or more sugar-modified nucleosides may have desirable properties, such as enhanced nuclease stability or increased binding affinity with a target nucleic acid relative to oligonucleotides lacking such sugar-modified nucleosides. In certain embodiments, modified sugar moieties are linearly modified sugar moieties. In certain embodiments, modified sugar moieties are bicyclic or tricyclic sugar moieties. In certain embodiments, modified sugar moieties are sugar surrogates. Such sugar surrogates may comprise one or more substitutions corresponding to those of substituted sugar moieties.

[0359] In certain embodiments, modified sugar moieties are linearly modified sugar moieties comprising a furanosyl ring with one or more acyclic substituent, including but not limited to substituents at the 2′ and/or 5′ positions. Examples of 2′-substituent groups suitable for linearly modified sugar moieties include but are not limited to: 2′-F, 2′—OCH₃ (“OMe” or “O-methyl”), and 2′-O(CH₂)₂OCH₃ (“MOE”). In certain embodiments, 2′-substituent groups are selected from among: halo, allyl, amino, azido, SH, CN, OCN, CF₃, OCF₃, O—C₁-C₁₀ alkoxy, O—C₁-C₁₀ substituted alkoxy, O—C₁-C₁₀ alkyl, O—C₁-C₁₀ substituted alkyl, S-alkyl, N(Rₘ)-alkyl, O-alkenyl, S-alkenyl, N(Rₘ)-alkenyl, O-alkynyl, S-alkynyl, N(Rₘ)-alkynyl, O-alkylenyl-O-alkyl, alkynyl, alkaryl, aralkyl, O-alkaryl, O-aralkyl, O(CH₂)₂SCH₃, O(CH₂)₂ON(Rₘ)(Rₙ) or OCH₂C(═O)—N(Rₘ)(Rₙ), where each Rₘ and Rₙ is, independently, H, an amino protecting group, or substituted or unsubstituted C₁-C₁₀ alkyl. Certain embodiments of these 2′-substituent groups can be further substituted with one or more substituent groups independently selected from among: hydroxyl, amino, alkoxy, carboxy, benzyl, phenyl, nitro (NO₂), thiol, thioalkoxy, thioalkyl, halogen, alkyl, aryl, alkenyl and alkynyl. Examples of 5′-substituent groups suitable for linearly modified sugar moieties include but are not limited to: 5′-methyl (R or S), 5′-vinyl, and 5′-methoxy. In certain embodiments, linearly modified sugars comprise more than one non-bridging sugar substituent, for example, 2′-F-5′-methyl sugar moieties (see, e.g., PCT International Application WO 2008/101157, for additional 2′,5′-bis substituted sugar moieties and nucleosides).

[0360] In certain embodiments, a 2′-substituted nucleoside or 2′-linearly modified nucleoside comprises a sugar moiety comprising a linear 2′-substituent group selected from: F, NH₂, N₃, OCF₃, OCH₃, O(CH₂)₃NH₂, CH₂CH═CH₂, OCH₂CH—CH₂, OCH₂CH₂OCH₃, O(CH₂)₂SCH₃, O(CH₂)₂ON(Rₘ)(Rₙ), O(CH₂)₂O(CH₂)₂N(CH₃)₂, and N-substituted acetamide (OCH₂C(═O)—N(Rₘ)(Rₙ)), where each Rₘ and Rₙ is, independently, H, an amino protecting group, or substituted or unsubstituted C₁-C₁₀ alkyl.

[0361] In certain embodiments, a 2′-substituted nucleoside or 2′-linearly modified nucleoside comprises a sugar moiety comprising a linear 2′-substituent group selected from: F, OCF₃, OCH₃, OCH₂CH₂OCH₃, O(CH₂)₂SCH₃, O(CH₂)₂ON(CH₃)₂, O(CH₂)₂O(CH₂)₂N(CH₃)₂, and OCH₂C(═O)—N(H) CH₃ (“NMA”).

[0362] In certain embodiments, a 2′-substituted nucleoside or 2′-linearly modified nucleoside comprises a sugar moiety comprising a linear 2′-substituent group selected from: F, OCH₃, and OCH₂CH₂OCH₃.

[0363] Nucleosides comprising modified sugar moieties, such as linearly modified sugar moieties, are referred to by the position(s) of the substitution(s) on the sugar moiety of the nucleoside. For example, nucleosides comprising 2′-substituted or 2-modified sugar moieties are referred to as 2′-substituted nucleosides or 2-modified nucleosides.

[0364] Certain modified sugar moieties comprise a bridging sugar substituent that forms a second ring resulting in a bicyclic sugar moiety. In certain such embodiments, the bicyclic sugar moiety comprises a bridge between the 4′ and the 2′ furanose ring atoms. Examples of such 4′ to 2′ bridging sugar substituents include but are not limited to: 4′-CH₂-2′,4′—(CH₂)₂—2′,4′—(CH₂)₃—2′,4′-CH₂—O-2′ (“LNA”), 4′-CH₂—S-2′,4′—(CH₂)₂—O-2′ (“ENA”), 4′-CH(CH₃)—O-2′ (referred to as “constrained ethyl” or “cEt” when in the S configuration), 4′-CH₂—O—CH₂-2′,4′-CH₂—N(R)-2′,4′-CH(CH₂OCH₃)—O-2′ (“constrained MOE” or “cMOE”) and analogs thereof (see, e.g., U.S. Pat. No. 7,399,845), 4′-C(CH₃)(CH₃)—O-2′ and analogs thereof (see, e.g., WO2009/006478), 4′-CH₂—N(OCH₃)-2′ and analogs thereof (see, e.g., WO2008/150729), 4′-CH₂—O—N(CH₃)-2′ (see, e.g., US2004/0171570), 4′-CH₂—C(H)(CH₃)-2′ (see, e.g., Chattopadhyaya, et al., J. Org. Chem., 2009, 74, 118-134), 4′-CH₂—C(═CH₂)-2′ and analogs thereof (see, published PCT International Application WO 2008/154401), 4′-C(RₐR_{b})—N(R)—O-2′,4′-C(RₐR_{b})—O—N(R)-2′,4′-CH₂—O—N(R)-2′, and 4′-CH₂—N(R)—O-2′, wherein each R, Rₐ, and R_{b} is, independently, H, a protecting group, or C₁-C₁₂ alkyl (see, e.g. U.S. Pat. No. 7,427,672).

[0365] In certain embodiments, such 4′ to 2′ bridges independently comprise from 1 to 4 linked groups independently selected from:—[C(Rₐ)(R_{b})]ₙ—, —[C(Rₐ)(R_{b})]ₙ—O—, —C(Rₐ)═C(R_{b})—, —C(Rₐ)═N—, —C(═NRₐ)—, —C(═O)—, —C(═S)—, —O—, —Si(Rₐ)₂—, —S(═O)ₓ—, and —N(Rₐ)—;
[0366] wherein:
[0367] x is 0, 1, or 2;
[0368] n is 1, 2, 3, or 4;
[0369] each Rₐ and R_{b} is, independently, H, a protecting group, hydroxyl, C₁-C₁₂ alkyl, substituted C₁-C₁₂ alkyl, C₂-C₁₂ alkenyl, substituted C₂-C₁₂ alkenyl, C₂-C₁₂ alkynyl, substituted C₂-C₁₂ alkynyl, C₅-C₂₀ aryl, substituted C₅-C₂₀ aryl, heterocycle radical, substituted heterocycle radical, heteroaryl, substituted heteroaryl, C₅-C₇ alicyclic radical, substituted C₅-C₇ alicyclic radical, halogen, OJ₁, NJ₁J₂, SJ₁, N₃, COOJ₁, acyl (C(═O)—H), substituted acyl, CN, sulfonyl (S(═O)₂-J₁), or sulfoxyl (S(═O)-J₁); and each J₁ and J₂ is, independently, H, C₁-C₁₂ alkyl, substituted C₁-C₁₂ alkyl, C₂-C₁₂ alkenyl, substituted C₂-C₁₂ alkenyl, C₂-C₁₂ alkynyl, substituted C₂-C₁₂ alkynyl, C₅-C₂₀ aryl, substituted C₅-C₂₀ aryl, acyl (C(═O)—H), substituted acyl, a heterocycle radical, a substituted heterocycle radical, C₁-C₁₂ aminoalkyl, substituted C₁-C₁₂ aminoalkyl, or a protecting group.

[0370] Additional bicyclic sugar moieties are known in the art, for example: Freier et al., Nucleic Acids Research, 1997, 25 (22), 4429-4443, Albaek et al., J. Org. Chem., 2006, 71, 7731-7740, Singh et al., Chem. Commun., 1998, 4, 455-456; Koshkin et al., Tetrahedron, 1998, 54, 3607-3630; Wahlestedt et al., Proc. Natl. Acad. Sci. U.S.A, 2000, 97, 5633-5638; Kumar et al., Bioorg. Med. Chem. Lett., 1998, 8, 2219-2222; Singh et al., J. Org. Chem., 1998, 63, 10035-10039; Srivastava et al., J. Am. Chem. Soc., 20017, 129, 8362-8379; Elayadi et al., Curr. Opinion Invens. Drugs, 2001, 2, 558-561; Braasch et al., Chem. Biol., 2001, 8, 1-7; Orum et al., Curr. Opinion Mol. Ther., 2001, 3, 239-243; U.S. Pat. Nos. 7,053,207, 6,268,490, 6,770,748, 6,794,499, 7,034,133, 6,525,191, 6,670,461, and 7,399,845; WO 2004/106356, WO 1994/14226, WO 2005/021570, and WO 2007/134181; U.S. Patent Publication Nos. US2004/0171570, US2007/0287831, and US2008/0039618; U.S. patents Ser. Nos. 12/129,154, 60/989,574, 61/026,995, 61/026,998, 61/056,564, 61/086,231, 61/097,787, and 61/099,844; and PCT International Applications Nos. PCT/US2008/064591, PCT/US2008/066154, and PCT/US2008/068922.

[0371] In certain embodiments, bicyclic sugar moieties and nucleosides incorporating such bicyclic sugar moieties are further defined by isomeric configuration. For example, an LNA nucleoside (described above) may be in the α-L configuration or in the β-D configuration.

[chemical structure]

[0372] α-L-methyleneoxy (4′-CH₂—O-2′) or α-L-LNA bicyclic nucleosides have been incorporated into antisense oligonucleotides that showed antisense activity (Frieden et al., Nucleic Acids Research, 2003, 21, 6365-6372). Herein, general descriptions of bicyclic nucleosides include both isomeric configurations. When the positions of specific bicyclic nucleosides (e.g., LNA or cEt) are identified in exemplified embodiments herein, they are in the B-D configuration, unless otherwise specified.

[0373] In certain embodiments, modified sugar moieties comprise one or more non-bridging sugar substituent and one or more bridging sugar substituent (e.g., 5′-substituted and 4′-2′ bridged sugars). (see, e.g., WO 2007/134181, wherein LNA nucleosides are further substituted with, for example, a 5′-methyl or a 5′-vinyl group, and see, e.g., U.S. Pat. Nos. 7,547,684; 7,750,131; 8,030,467; 8,268,980; 7,666,854; and 8,088,746).

[0374] In certain embodiments, modified sugar moieties are sugar surrogates. In certain such embodiments, the oxygen atom of the sugar moiety is replaced, e.g., with a sulfur, carbon or nitrogen atom. In certain such embodiments, such modified sugar moieties also comprise bridging and/or non-bridging substituents as described above. For example, certain sugar surrogates comprise a 4′-sulfur atom and a substitution at the 2′-position (see, e.g., US2005/0130923) and/or the 5′ position.

[0375] In certain embodiments, sugar surrogates comprise rings having other than 5 atoms. For example, in certain embodiments, a sugar surrogate comprises a six-membered tetrahydropyran (“THP”). Such tetrahydropyrans may be further modified or substituted. Nucleosides comprising such modified tetrahydropyrans include but are not limited to hexitol nucleic acid (“HNA”), anitol nucleic acid (“ANA”), manitol nucleic acid (“MNA”)(see Leumann, C J. Bioorg. & Med. Chem. 2002, 10, 841-854), fluoro HNA:

[chemical structure]

[0376] (“F-HNA”, see e.g., U.S. Pat. Nos. 8,088,904; 8,440,803; and 8,796,437, F-HNA can also be referred to as a F-THP or 3′-fluoro tetrahydropyran), and nucleosides comprising additional modified THP compounds having the formula:

[chemical structure]

[0377] wherein, independently, for each of said modified THP nucleoside:
[0378] Bx is a nucleobase moiety;

[0379] T₃ and T₄ are each, independently, an internucleoside linking group linking the modified THP nucleoside to the remainder of an oligonucleotide or one of T₃ and T₄ is an internucleoside linking group linking the modified THP nucleoside to the remainder of an oligonucleotide and the other of T₃ and T₄ is H, a hydroxyl protecting group, a linked conjugate group, or a 5′ or 3′-terminal group; q₁, q₂, q₃, q₄, q₅, q₆ and q₇ are each, independently, H, C₁-C₆ alkyl, substituted C₁-C₆ alkyl, C₂-C₆ alkenyl, substituted C₂-C₆ alkenyl, C₂-C₆ alkynyl, or substituted C₂-C₆ alkynyl; and each of R₁ and R₂ is independently selected from among: hydrogen, halogen, substituted or unsubstituted alkoxy, NJ₁J₂, SJ₁, N₃, OC(═X) J₁, OC(═X) NJ₁J₂, NJ₃C(═X) NJ₁J₂, and CN, wherein X is O, S or NJ₁, and each J₁, J₂, and J₃ is, independently, H or C₁-C₆ alkyl.

[0380] In certain embodiments, modified THP nucleosides are provided wherein q₁, q₂, q₃, q₄, q₅, q₆ and q₇ are each H. In certain embodiments, at least one of q₁, q₂, q₃, q₄, q₅, q₆ and q₇ is other than H. In certain embodiments, at least one of q₁, q₂, q₃, q₄, q₅, q₆ and q₇ is methyl. In certain embodiments, modified THP nucleosides are provided wherein one of R₁ and R₂ is F. In certain embodiments, R₁ is F and R₂ is H, in certain embodiments, R₁ is methoxy and R₂ is H, and in certain embodiments, R₁ is methoxyethoxy and R₂ is H.

[0381] In certain embodiments, sugar surrogates comprise rings having more than 5 atoms and more than one heteroatom. For example, nucleosides comprising morpholino sugar moieties and their use in oligonucleotides have been reported (see, e.g., Braasch et al., Biochemistry, 2002, 41, 4503-4510 and U.S. Pat. Nos. 5,698,685; 5,166,315; 5,185,444; and 5,034,506). As used here, the term “morpholino” means a sugar surrogate having the following structure:

[chemical structure]

[0382] In certain embodiments, morpholinos may be modified, for example by adding or altering various substituent groups from the above morpholino structure. Such sugar surrogates are referred to herein as “modified morpholinos.”

[0383] In certain embodiments, sugar surrogates comprise acyclic moieties. Examples of nucleosides and oligonucleotides comprising such acyclic sugar surrogates include but are not limited to: peptide nucleic acid (“PNA”), acyclic butyl nucleic acid (see, e.g., Kumar et al., Org. Biomol. Chem., 2013, 11, 5853-5865), and nucleosides and oligonucleotides described in WO2011/133876.

[0384] Many other bicyclic and tricyclic sugar and sugar surrogate ring systems are known in the art that can be used in modified nucleosides (see, e.g., Leumann, J. C, Bioorganic & Medicinal Chemistry, 2002, 10, 841-854).

### Modified Nucleobases

[0385] Nucleobase (or base) modifications or substitutions are structurally distinguishable from, yet functionally interchangeable with, naturally occurring or synthetic unmodified nucleobases. Both natural and modified nucleobases are capable of participating in hydrogen bonding. Such nucleobase modifications can impart nuclease stability, binding affinity or some other beneficial biological property to antisense compounds.

[0386] In certain embodiments, modified oligonucleotides comprise one or more nucleoside comprising an unmodified nucleobase. In certain embodiments, modified oligonucleotides comprise one or more nucleoside comprising a modified nucleobase. In certain embodiments, modified oligonucleotides comprise one or more nucleoside that does not comprise a nucleobase, referred to as an abasic nucleoside.

[0387] In certain embodiments, modified nucleobases are selected from: 5-substituted pyrimidines, 6-azapyrimidines, alkyl or alkynyl substituted pyrimidines, alkyl substituted purines, and N-2, N-6 and O-6 substituted purines. In certain embodiments, modified nucleobases are selected from: 2-aminopropyladenine, 5-hydroxymethyl cytosine, xanthine, hypoxanthine, 2-aminoadenine, 6-N-methylguanine, 6-N-methyladenine, 2-propyladenine, 2-thiouracil, 2-thiothymine and 2-thiocytosine, 5-propynyl (—C≡C—CH₃) uracil, 5-propynylcytosine, 6-azauracil, 6-azocytosine, 6-azothymine, 5-ribosyluracil (pseudouracil), 4-thiouracil, 8-halo, 8-amino, 8-thiol, 8-thioalkyl, 8-hydroxyl, 8-aza and other 8-substituted purines, 5-halo, particularly 5-bromo, 5-trifluoromethyl, 5-halouracil, and 5-halocytosine, 7-methylguanine, 7-methyladenine, 2-F-adenine, 2-aminoadenine, 7-deazaguanine, 7-deazaadenine, 3-deazaguanine, 3-deazaadenine, 6-N-benzoyladenine, 2-N-isobutyrylguanine, 4-N-benzoylcytosine, 4-N-benzoyluracil, 5-methyl 4-N-benzoylcytosine, 5-methyl 4-N-benzoyluracil, universal bases, hydrophobic bases, promiscuous bases, size-expanded bases, and fluorinated bases. Further modified nucleobases include tricyclic pyrimidines, such as 1,3-diazaphenoxazine-2-one, 1,3-diazaphenothiazine-2-one and 9-(2-aminoethoxy)-1,3-diazaphenoxazine-2-one (G-clamp). Modified nucleobases may also include those in which the purine or pyrimidine base is replaced with other heterocycles, for example 7-deaza-adenine, 7-deazaguanosine, 2-aminopyridine and 2-pyridone. Further nucleobases include those disclosed in U.S. Pat. No. 3,687,808, those disclosed in The Concise Encyclopedia Of Polymer Science And Engineering, Kroschwitz, J. I., Ed., John Wiley & Sons, 1990, 858-859; Englisch et al., Angewandte Chemie, International Edition, 1991, 30, 613; Sanghvi, Y. S., Chapter 15, Antisense Research and Applications, Crooke, S. T. and Lebleu, B., Eds., CRC Press, 1993, 273-288; and those disclosed in Chapters 6 and 15, Antisense Drug Technology, Crooke S. T., Ed., CRC Press, 2008, 163-166 and 442-443.

[0388] Representative United States patents that teach the preparation of certain of the above noted modified nucleobases as well as other modified nucleobases include without limitation, US2003/0158403, U.S. Pat. Nos. 3,687,808; 4,845,205; 5,130,302; 5,134,066; 5,175,273; 5,367,066; 5,432,272; 5,434,257; 5,457,187; 5,459,255; 5,484,908; 5,502,177; 5,525,711; 5,552,540; 5,587,469; 5,594,121; 5,596,091; 5,614,617; 5,645,985; 5,681,941; 5,750,692; 5,763,588; 5,830,653 and 6,005,096.

[0389] In certain embodiments, antisense compounds targeted to a DGAT2 nucleic acid comprise one or more modified nucleobases. In certain embodiments, the modified nucleobase is 5-methylcytosine. In certain embodiments, each cytosine is a 5-methylcytosine.

### Certain Motifs

[0390] Oligonucleotides can have a motif, e.g. a pattern of unmodified and/or modified sugar moieties, nucleobases, and/or internucleoside linkages. In certain embodiments, modified oligonucleotides comprise one or more modified nucleoside comprising a modified sugar. In certain embodiments, modified oligonucleotides comprise one or more modified nucleosides comprising a modified nucleobase. In certain embodiments, modified oligonucleotides comprise one or more modified internucleoside linkage. In such embodiments, the modified, unmodified, and differently modified sugar moieties, nucleobases, and/or internucleoside linkages of a modified oligonucleotide define a pattern or motif. In certain embodiments, the patterns of sugar moieties, nucleobases, and internucleoside linkages are each independent of one another. Thus, a modified oligonucleotide may be described by its sugar motif, nucleobase motif and/or internucleoside linkage motif (as used herein, nucleobase motif describes the modifications to the nucleobases independent of the sequence of nucleobases).

### 1. Certain Sugar Motifs

[0391] In certain embodiments, oligonucleotides comprise one or more type of modified sugar and/or unmodified sugar moiety arranged along the oligonucleotide or region thereof in a defined pattern or sugar motif. In certain instances, such sugar motifs include but are not limited to any of the sugar modifications discussed herein.

[0392] In certain embodiments, modified oligonucleotides comprise or consist of a region having a gapmer motif, which comprises two external regions or “wings” and a central or internal region or “gap.” The three regions of a gapmer motif (the 5′-wing, the gap, and the 3′-wing) form a contiguous sequence of nucleosides wherein at least some of the sugar moieties of the nucleosides of each of the wings differ from at least some of the sugar moieties of the nucleosides of the gap. Specifically, at least the sugar moieties of the nucleosides of each wing that are closest to the gap (the 3′-most nucleoside of the 5′-wing and the 5′-most nucleoside of the 3′-wing) differ from the sugar moiety of the neighboring gap nucleosides, thus defining the boundary between the wings and the gap (i.e., the wing/gap junction). In certain embodiments, the sugar moieties within the gap are the same as one another. In certain embodiments, the gap includes one or more nucleoside having a sugar moiety that differs from the sugar moiety of one or more other nucleosides of the gap. In certain embodiments, the sugar motifs of the two wings are the same as one another (symmetric gapmer). In certain embodiments, the sugar motif of the 5′-wing differs from the sugar motif of the 3′-wing (asymmetric gapmer).

[0393] In certain embodiments, the wings of a gapmer comprise 1-5 nucleosides. In certain embodiments, the wings of a gapmer comprise 2-5 nucleosides. In certain embodiments, the wings of a gapmer comprise 3-5 nucleosides. In certain embodiments, the nucleosides of a gapmer are all modified nucleosides.

[0394] In certain embodiments, the gap of a gapmer comprises 7-12 nucleosides. In certain embodiments, the gap of a gapmer comprises 7-10 nucleosides. In certain embodiments, the gap of a gapmer comprises 8-10 nucleosides. In certain embodiments, the gap of a gapmer comprises 10 nucleosides. In certain embodiment, each nucleoside of the gap of a gapmer is an unmodified 2′-deoxy nucleoside.

[0395] In certain embodiments, the gapmer is a deoxy gapmer. In such embodiments, the nucleosides on the gap side of each wing/gap junction are unmodified 2′-deoxy nucleosides and the nucleosides on the wing sides of each wing/gap junction are modified nucleosides. In certain such embodiments, each nucleoside of the gap is an unmodified 2′-deoxy nucleoside. In certain such embodiments, each nucleoside of each wing is a modified nucleoside.

[0396] In certain embodiments, modified oligonucleotides comprise or consist of a region having a fully modified sugar motif. In such embodiments, each nucleoside of the fully modified region of the modified oligonucleotide comprises a modified sugar moiety. In certain such embodiments, each nucleoside to the entire modified oligonucleotide comprises a modified sugar moiety. In certain embodiments, modified oligonucleotides comprise or consist of a region having a fully modified sugar motif, wherein each nucleoside within the fully modified region comprises the same modified sugar moiety, referred to herein as a uniformly modified sugar motif. In certain embodiments, a fully modified oligonucleotide is a uniformly modified oligonucleotide. In certain embodiments, each nucleoside of a uniformly modified comprises the same 2′-modification.

### 2. Certain Nucleobase Motifs

[0397] In certain embodiments, oligonucleotides comprise modified and/or unmodified nucleobases arranged along the oligonucleotide or region thereof in a defined pattern or motif. In certain embodiments, each nucleobase is modified. In certain embodiments, none of the nucleobases are modified. In certain embodiments, each purine or each pyrimidine is modified. In certain embodiments, each adenine is modified. In certain embodiments, each guanine is modified. In certain embodiments, each thymine is modified. In certain embodiments, each uracil is modified. In certain embodiments, each cytosine is modified. In certain embodiments, some or all of the cytosine nucleobases in a modified oligonucleotide are 5-methylcytosines.

[0398] In certain embodiments, modified oligonucleotides comprise a block of modified nucleobases. In certain such embodiments, the block is at the 3′-end of the oligonucleotide. In certain embodiments the block is within 3 nucleosides of the 3′-end of the oligonucleotide. In certain embodiments, the block is at the 5′-end of the oligonucleotide. In certain embodiments the block is within 3 nucleosides of the 5′-end of the oligonucleotide.

[0399] In certain embodiments, oligonucleotides having a gapmer motif comprise a nucleoside comprising a modified nucleobase. In certain such embodiments, one nucleoside comprising a modified nucleobase is in the central gap of an oligonucleotide having a gapmer motif. In certain such embodiments, the sugar moiety of said nucleoside is a 2′-deoxyribosyl moiety. In certain embodiments, the modified nucleobase is selected from: a 2-thiopyrimidine and a 5-propynepyrimidine.

### 3. Certain Internucleoside Linkage Motifs

[0400] In certain embodiments, oligonucleotides comprise modified and/or unmodified internucleoside linkages arranged along the oligonucleotide or region thereof in a defined pattern or motif. In certain embodiments, essentially each internucleoside linking group is a phosphate internucleoside linkage (P═O). In certain embodiments, each internucleoside linking group of a modified oligonucleotide is a phosphorothioate (P═S). In certain embodiments, each internucleoside linking group of a modified oligonucleotide is independently selected from a phosphorothioate and phosphate internucleoside linkage. In certain embodiments, the sugar motif of a modified oligonucleotide is a gapmer and the internucleoside linkages within the gap are all modified. In certain such embodiments, some or all of the internucleoside linkages in the wings are unmodified phosphate linkages. In certain embodiments, the terminal internucleoside linkages are modified.

### Certain Oligonucleotides

[0401] Oligonucleotides are characterized by their motifs and overall lengths. In certain embodiments, such parameters are each independent of one another. Thus, unless otherwise indicated, each internucleoside linkage of an oligonucleotide having a gapmer motif may be modified or unmodified and may or may not follow the gapmer modification pattern of the sugar modifications. For example, the internucleoside linkages within the wing regions of a gapmer may be the same or different from one another and may be the same or different from the internucleoside linkages of the gap region. Likewise, such gapmer oligonucleotides may comprise one or more modified nucleobase independent of the gapmer pattern of the sugar modifications. Furthermore, unless otherwise indicated, each internucleoside linkage and each nucleobase of a fully modified oligonucleotide may be modified or unmodified. One of skill in the art will appreciate that such motifs may be combined to create a variety of oligonucleotides. Herein, if a description of an oligonucleotide is silent with respect to one or more parameter, such parameter is not limited. Thus, a modified oligonucleotide described only as having a gapmer motif without further description may have any length, internucleoside linkage motif, and nucleobase motif. Unless otherwise indicated, all modifications are independent of nucleobase sequence.

[0402] In certain embodiments, oligonucleotides have a nucleobase sequence that is complementary to a second oligonucleotide or a target nucleic acid. In certain such embodiments, a region of an oligonucleotide has a nucleobase sequence that is complementary to a second oligonucleotide or a target nucleic acid. In certain embodiments, the nucleobase sequence of a region or entire length of an oligonucleotide is at least 50%, at least 60%, at least 70%, at least 80%, at least 90%, at least 95%, or 100% complementary to the second oligonucleotide or target nucleic acid. In certain embodiments, antisense compounds comprise two oligomeric compounds, wherein the two oligonucleotides of the oligomeric compounds are at least 80%, at least 90%, or 100% complementary to each other. In certain embodiments, one or both oligonucleotides of a double-stranded antisense compound comprise two nucleosides that are not complementary to the other oligonucleotide.

### Conjugated Groups and Terminal Groups

[0403] In certain embodiments, antisense compounds and oligomeric compounds comprise conjugate groups and/or terminal groups. In certain such embodiments, oligonucleotides are covalently attached to one or more conjugate group. In certain embodiments, conjugate groups modify one or more properties of the attached oligonucleotide, including but not limited to pharmacodynamics, pharmacokinetics, stability, binding, absorption, cellular distribution, cellular uptake, charge and clearance. In certain embodiments, conjugate groups impart a new property on the attached oligonucleotide, e.g., fluorophores or reporter groups that enable detection of the oligonucleotide. Conjugate groups and/or terminal groups may be added to oligonucleotides having any of the modifications or motifs described above. Thus, for example, an antisense compound or oligomeric compound comprising an oligonucleotide having a gapmer motif may also comprise a conjugate group.

[0404] Conjugate groups include, without limitation, intercalators, reporter molecules, polyamines, polyamides, peptides, carbohydrates, vitamin moieties, polyethylene glycols, thioethers, polyethers, cholesterols, thiocholesterols, cholic acid moieties, folate, lipids, phospholipids, biotin, phenazine, phenanthridine, anthraquinone, adamantane, acridine, fluoresceins, rhodamines, coumarins, fluorophores, and dyes. Certain conjugate groups have been described previously, for example: cholesterol moiety (Letsinger et al., Proc. Natl. Acad. Sci. USA, 1989, 86, 6553-6556), cholic acid (Manoharan et al., Bioorg. Med. Chem. Lett., 1994, 4, 1053-1060), a thioether, e.g., hexyl-S-tritylthiol (Manoharan et al., Ann. N.Y. Acad. Sci., 1992, 660, 306-309; Manoharan et al., Bioorg. Med. Chem. Let., 1993, 3, 2765-2770), a thiocholesterol (Oberhauser et al., Nucl. Acids Res., 1992, 20, 533-538), an aliphatic chain, e.g., do-decan-diol or undecyl residues (Saison-Behmoaras et al., EMBO J., 1991, 10, 1111-1118; Kabanov et al., FEBS Lett., 1990, 259, 327-330; Svinarchuk et al., Biochimie, 1993, 75, 49-54), a phospholipid, e.g., di-hexadecyl-rac-glycerol or triethyl-ammonium 1,2-di-O-hexadecyl-rac-glycero-3-H-phosphonate (Manoharan et al., Tetrahedron Lett., 1995, 36, 3651-3654; Shea et al., Nucl. Acids Res., 1990, 18, 3777-3783), a polyamine or a polyethylene glycol chain (Manoharan et al., Nucleosides & Nucleotides, 1995, 14, 969-973), or adamantane acetic acid (Manoharan et al., Tetrahedron Lett., 1995, 36, 3651-3654), a palmityl moiety (Mishra et al., Biochim. Biophys. Acta, 1995, 1264, 229-237), an octadecylamine or hexylamino-carbonyl-oxycholesterol moiety (Crooke et al., J. Pharmacol. Exp. Ther., 1996, 277, 923-937), a tocopherol group (Nishina et al., Molecular Therapy Nucleic Acids, 2015, 4, e220; doi: 10.1038/mtna.2014.72 and Nishina et al., Molecular Therapy, 2008, 16, 734-740), or a GalNAc cluster (e.g., WO2014/179620).

[0405] In certain embodiments, a conjugate group comprises an active drug substance, for example, aspirin, warfarin, phenylbutazone, ibuprofen, suprofen, fen-bufen, ketoprofen, (S)-(+)-pranoprofen, carprofen, dansylsarcosine, 2,3,5-triiodobenzoic acid, fingolimod, flufenamic acid, folinic acid, a benzothiadiazide, chlorothiazide, a diazepine, indo-methicin, a barbiturate, a cephalosporin, a sulfa drug, an antidiabetic, an antibacterial or an antibiotic.

[0406] Conjugate groups are attached directly or via an optional conjugate linker to a parent compound, such as an oligonucleotide. In certain embodiments, conjugate groups are directly attached to oligonucleotides. In certain embodiments, conjugate groups are indirectly attached to oligonucleotides via conjugate linkers. In certain embodiments, the conjugate linker comprises a chain structure, such as a hydrocarbyl chain, or an oligomer of repeating units such as ethylene glycol or amino acid units. In certain embodiments, conjugate groups comprise a cleavable moiety. In certain embodiments, conjugate groups are attached to oligonucleotides via a cleavable moiety. In certain embodiments, conjugate linkers comprise a cleavable moiety. In certain such embodiments, conjugate linkers are attached to oligonucleotides via a cleavable moiety. In certain embodiments, oligonucleotides comprise a cleavable moiety, wherein the cleavable moiety is a nucleoside is attached to a cleavable internucleoside linkage, such as a phosphate internucleoside linkage. In certain embodiments, a conjugate group comprises a nucleoside or oligonucleotide, wherein the nucleoside or oligonucleotide of the conjugate group is indirectly attached to a parent oligonucleotide.

[0407] In certain embodiments, a conjugate linker comprises one or more groups selected from alkyl, amino, oxo, amide, disulfide, polyethylene glycol, ether, thioether, and hydroxylamino. In certain such embodiments, the conjugate linker comprises groups selected from alkyl, amino, oxo, amide and ether groups. In certain embodiments, the conjugate linker comprises groups selected from alkyl and amide groups. In certain embodiments, the conjugate linker comprises groups selected from alkyl and ether groups. In certain embodiments, the conjugate linker comprises at least one phosphorus moiety. In certain embodiments, the conjugate linker comprises at least one phosphate group. In certain embodiments, the conjugate linker includes at least one neutral linking group.

[0408] In certain embodiments, conjugate linkers, including the conjugate linkers described above, are bifunctional linking moieties, e.g., those known in the art to be useful for attaching conjugate groups to parent compounds, such as the oligonucleotides provided herein. In general, a bifunctional linking moiety comprises at least two functional groups. One of the functional groups is selected to bind to a particular site on a parent compound and the other is selected to bind to a conjugate group. Examples of functional groups used in a bifunctional linking moiety include but are not limited to electrophiles for reacting with nucleophilic groups and nucleophiles for reacting with electrophilic groups. In certain embodiments, bifunctional linking moieties comprise one or more groups selected from amino, hydroxyl, carboxylic acid, thiol, alkyl, alkenyl, and alkynyl.

[0409] Examples of conjugate linkers include but are not limited to pyrrolidine, 8-amino-3,6-dioxaoctanoic acid (ADO), succinimidyl 4-(N-maleimidomethyl)cyclohexane-1-carboxylate (SMCC) and 6-aminohexanoic acid (AHEX or AHA). Other conjugate linkers include but are not limited to substituted or unsubstituted C₁-C₁₀ alkyl, substituted or unsubstituted C₂-C₁₀ alkenyl or substituted or unsubstituted C₂-C₁₀ alkynyl, wherein a nonlimiting list of preferred substituent groups includes hydroxyl, amino, alkoxy, carboxy, benzyl, phenyl, nitro, thiol, thioalkoxy, halogen, alkyl, aryl, alkenyl and alkynyl.

[0410] In certain embodiments, a cleavable moiety is a cleavable bond. In certain embodiments, a cleavable moiety comprises a cleavable bond. In certain embodiments, a cleavable moiety is a group of atoms comprising at least one cleavable bond. In certain embodiments, a cleavable moiety comprises a group of atoms having one, two, three, four, or more than four cleavable bonds. In certain embodiments, a cleavable moiety is selectively cleaved inside a cell or subcellular compartment, such as a lysosome. In certain embodiments, a cleavable moiety is selectively cleaved by endogenous enzymes, such as nucleases.

[0411] In certain embodiments, a cleavable bond is selected from among: an amide, an ester, an ether, one or both esters of a phosphodiester, a phosphate ester, a carbamate, or a disulfide. In certain embodiments, a cleavable bond is one or both of the esters of a phosphodiester. In certain embodiments, a cleavable moiety comprises a phosphate or phosphodiester. In certain embodiments, the cleavable moiety is a phosphate linkage between an oligonucleotide and a conjugate linker or conjugate group.

[0412] In certain embodiments, a cleavable moiety is a nucleoside. In certain such embodiments, the unmodified or modified nucleoside comprises an optionally protected heterocyclic base selected from a purine, substituted purine, pyrimidine or substituted pyrimidine. In certain embodiments, a cleavable moiety is a nucleoside selected from uracil, thymine, cytosine, 4-N-benzoylcytosine, 5-methylcytosine, 4-N-benzoyl-5-methylcytosine, adenine, 6-N-benzoyladenine, guanine and 2-N-isobutyrylguanine. In certain embodiments, a cleavable moiety is 2′-deoxy nucleoside that is attached to either the 3′ or 5′-terminal nucleoside of an oligonucleotide by a phosphate internucleoside linkage and covalently attached to the conjugate linker or conjugate group by a phosphate or phosphorothioate linkage. In certain such embodiments, the cleavable moiety is 2′-deoxyadenosine.

[0413] Conjugate groups may be attached to either or both ends of an oligonucleotide and/or at any internal position. In certain embodiments, conjugate groups are attached to the 2′-position of a nucleoside of a modified oligonucleotide. In certain embodiments, conjugate groups that are attached to either or both ends of an oligonucleotide are terminal groups. In certain such embodiments, conjugate groups or terminal groups are attached at the 3′ and/or 5′-end of oligonucleotides. In certain such embodiments, conjugate groups (or terminal groups) are attached at the 3′-end of oligonucleotides. In certain embodiments, conjugate groups are attached near the 3′-end of oligonucleotides. In certain embodiments, conjugate groups (or terminal groups) are attached at the 5′-end of oligonucleotides. In certain embodiments, conjugate groups are attached near the 5′-end of oligonucleotides.

[0414] Examples of terminal groups include but are not limited to conjugate groups, capping groups, phosphate moieties, protecting groups, modified or unmodified nucleosides, and two or more nucleosides that are independently modified or unmodified.

[0415] In certain embodiments, a conjugate group is a cell-targeting moiety. In certain embodiments, a conjugate group, optional conjugate linker, and optional cleavable moiety have the general formula:

[chemical structure]

wherein n is from 1 to about 3, m is 0 when n is 1, m is 1 when n is 2 or greater, j is 1 or 0, and k is 1 or 0.

[0416] In certain embodiments, n is 1, j is 1 and k is 0. In certain embodiments, n is 1, j is 0 and k is 1. In certain embodiments, n is 1, j is 1 and k is 1. In certain embodiments, n is 2, j is 1 and k is 0. In certain embodiments, n is 2, j is 0 and k is 1. In certain embodiments, n is 2, j is 1 and k is 1. In certain embodiments, n is 3, j is 1 and k is 0. In certain embodiments, n is 3, j is 0 and k is 1. In certain embodiments, n is 3, j is 1 and k is 1.

[0417] In certain embodiments, conjugate groups comprise cell-targeting moieties that have at least one tethered ligand. In certain embodiments, cell-targeting moieties comprise two tethered ligands covalently attached to a branching group. In certain embodiments, cell-targeting moieties comprise three tethered ligands covalently attached to a branching group.

[0418] In certain embodiments, the cell-targeting moiety comprises a branching group comprising one or more groups selected from alkyl, amino, oxo, amide, disulfide, polyethylene glycol, ether, thioether and hydroxylamino groups. In certain embodiments, the branching group comprises a branched aliphatic group comprising groups selected from alkyl, amino, oxo, amide, disulfide, polyethylene glycol, ether, thioether and hydroxylamino groups. In certain such embodiments, the branched aliphatic group comprises groups selected from alkyl, amino, oxo, amide and ether groups. In certain such embodiments, the branched aliphatic group comprises groups selected from alkyl, amino and ether groups. In certain such embodiments, the branched aliphatic group comprises groups selected from alkyl and ether groups. In certain embodiments, the branching group comprises a mono or polycyclic ring system.

[0419] In certain embodiments, each tether of a cell-targeting moiety comprises one or more groups selected from alkyl, substituted alkyl, ether, thioether, disulfide, amino, oxo, amide, phosphodiester, and polyethylene glycol, in any combination. In certain embodiments, each tether is a linear aliphatic group comprising one or more groups selected from alkyl, ether, thioether, disulfide, amino, oxo, amide, and polyethylene glycol, in any combination. In certain embodiments, each tether is a linear aliphatic group comprising one or more groups selected from alkyl, phosphodiester, ether, amino, oxo, and amide, in any combination. In certain embodiments, each tether is a linear aliphatic group comprising one or more groups selected from alkyl, ether, amino, oxo, and amid, in any combination. In certain embodiments, each tether is a linear aliphatic group comprising one or more groups selected from alkyl, amino, and oxo, in any combination. In certain embodiments, each tether is a linear aliphatic group comprising one or more groups selected from alkyl and oxo, in any combination. In certain embodiments, each tether is a linear aliphatic group comprising one or more groups selected from alkyl and phosphodiester, in any combination. In certain embodiments, each tether comprises at least one phosphorus linking group or neutral linking group. In certain embodiments, each tether comprises a chain from about 6 to about 20 atoms in length. In certain embodiments, each tether comprises a chain from about 10 to about 18 atoms in length. In certain embodiments, each tether comprises about 10 atoms in chain length.

[0420] In certain embodiments, each ligand of a cell-targeting moiety has an affinity for at least one type of receptor on a target cell. In certain embodiments, each ligand has an affinity for at least one type of receptor on the surface of a mammalian liver cell. In certain embodiments, each ligand has an affinity for the hepatic asialoglycoprotein receptor (ASGP-R). In certain embodiments, each ligand is a carbohydrate. In certain embodiments, each ligand is, independently selected from galactose, N-acetyl galactoseamine (GalNAc), mannose, glucose, glucosamine and fucose. In certain embodiments, each ligand is N-acetyl galactoseamine (GalNAc). In certain embodiments, the cell-targeting moiety comprises 3 GalNAc ligands. In certain embodiments, the cell-targeting moiety comprises 2 GalNAc ligands. In certain embodiments, the cell-targeting moiety comprises 1 GalNAc ligand.

[0421] In certain embodiments, each ligand of a cell-targeting moiety is a carbohydrate, carbohydrate derivative, modified carbohydrate, polysaccharide, modified polysaccharide, or polysaccharide derivative. In certain such embodiments, the conjugate group comprises a carbohydrate cluster (see, e.g., Maier et al., “Synthesis of Antisense Oligonucleotides Conjugated to a Multivalent Carbohydrate Cluster for Cellular Targeting,” Bioconjugate Chemistry, 2003, 14, 18-29, or Rensen et al., “Design and Synthesis of Novel N-Acetylgalactosamine-Terminated Glycolipids for Targeting of Lipoproteins to the Hepatic Asiaglycoprotein Receptor,” J. Med. Chem. 2004, 47, 5798-5808, which are incorporated herein by reference in their entirety). In certain such embodiments, each ligand is an amino sugar or a thio sugar. For example, amino sugars may be selected from any number of compounds known in the art, such as sialic acid, α-D-galactosamine, β-muramic acid, 2-deoxy-2-methylamino-L-glucopyranose, 4,6-dideoxy-4-formamido-2,3-di-O-methyl-D-mannopyranose, 2-deoxy-2-sulfoamino-D-glucopyranose and N-sulfo-D-glucosamine, and N-glycoloyl-α-neuraminic acid. For example, thio sugars may be selected from 5-Thio-β-D-glucopyranose, methyl 2,3,4-tri-O-acetyl-1-thio-6-O-trityl-α-D-glucopyranoside, 4-thio-β-D-galactopyranose, and ethyl 3,4,6,7-tetra-O-acetyl-2-deoxy-1,5-dithio-α-D-gluco-heptopyranoside.

[0422] In certain embodiments, conjugate groups comprise a cell-targeting moiety having the formula:

[chemical structure]

[0423] In certain embodiments, conjugate groups comprise a cell-targeting moiety having the formula:

[chemical structure]

[0424] In certain embodiments, conjugate groups comprise a cell-targeting moiety having the formula:

[chemical structure]

[0425] In certain embodiments, antisense compounds and oligomeric compounds comprise a conjugate group and conjugate linker described herein as “LICA-1”. LICA-1 has the formula:

[chemical structure]

[0426] In certain embodiments, antisense compounds and oligomeric compounds comprising LICA-1 have the formula:

[chemical structure]

[0427] wherein oligo is an oligonucleotide.

[0428] Representative United States patents, United States patent application publications, international patent application publications, and other publications that teach the preparation of certain of the above noted conjugate groups, oligomeric compounds and antisense compounds comprising conjugate groups, tethers, conjugate linkers, branching groups, ligands, cleavable moieties as well as other modifications include without limitation, U.S. Pat. Nos. 5,994,517, 6,300,319, 6,660,720, 6,906,182, 7,262,177, 7,491,805, 8,106,022, 7,723,509, US 2006/0148740, US 2011/0123520, WO 2013/033230 and WO 2012/037254, Biessen et al., J. Med. Chem. 1995, 38, 1846-1852, Lee et al., Bioorganic & Medicinal Chemistry 2011,19, 2494-2500, Rensen et al., J. Biol. Chem. 2001, 276, 37577-37584, Rensen et al., J. Med. Chem. 2004, 47, 5798-5808, Sliedregt et al., J. Med. Chem. 1999, 42, 609-618, and Valentijn et al., Tetrahedron, 1997, 53, 759-770, each of which is incorporated by reference herein in its entirety.

[0429] In certain embodiments, antisense compounds and oligomeric compounds comprise modified oligonucleotides comprising a gapmer or fully modified motif and a conjugate group comprising at least one, two, or three GalNAc ligands. In certain embodiments antisense compounds and oligomeric compounds comprise a conjugate group found in any of the following references: Lee, Carbohydr Res, 1978, 67, 509-514; Connolly et al., J Biol Chem, 1982, 257, 939-945; Pavia et al., Int J Pep Protein Res, 1983, 22, 539-548; Lee et al., Biochem, 1984, 23, 4255-4261; Lee et al., Glycoconjugate J, 1987, 4, 317-328; Toyokuni et al., Tetrahedron Lett, 1990, 31, 2673-2676; Biessen et al., J Med Chem, 1995, 38, 1538-1546; Valentijn et al., Tetrahedron, 1997, 53, 759-770; Kim et al., Tetrahedron Lett, 1997, 38, 3487-3490; Lee et al., Bioconjug Chem, 1997, 8, 762-765; Kato et al., Glycobiol, 2001, 11, 821-829; Rensen et al., J Biol Chem, 2001, 276, 37577-37584; Lee et al., Methods Enzymol, 2003, 362, 38-43; Westerlind et al., Glycoconj J, 2004, 21, 227-241; Lee et al., Bioorg Med Chem Lett, 2006, 16 (19), 5132-5135; Maierhofer et al., Bioorg Med Chem, 2007, 15, 7661-7676; Khorev et al., Bioorg Med Chem, 2008, 16, 5216-5231; Lee et al., Bioorg Med Chem, 2011, 19, 2494-2500; Kornilova et al., Analyt Biochem, 2012, 425, 43-46; Pujol et al., Angew Chemie Int Ed Engl, 2012, 51, 7445-7448; Biessen et al., J Med Chem, 1995, 38, 1846-1852; Sliedregt et al., J Med Chem, 1999, 42, 609-618; Rensen et al., J Med Chem, 2004, 47, 5798-5808; Rensen et al., Arterioscler Thromb Vasc Biol, 2006, 26, 169-175; van Rossenberg et al., Gene Ther, 2004, 11, 457-464; Sato et al., J Am Chem Soc, 2004, 126, 14013-14022; Lee et al., J Org Chem, 2012, 77, 7564-7571; Biessen et al., FASEB J, 2000, 14, 1784-1792; Rajur et al., Bioconjug Chem, 1997, 8, 935-940; Duff et al., Methods Enzymol, 2000, 313, 297-321; Maier et al., Bioconjug Chem, 2003, 14, 18-29; Jayaprakash et al., Org Lett, 2010, 12, 5410-5413; Manoharan, Antisense Nucleic Acid Drug Dev, 2002, 12, 103-128; Merwin et al., Bioconjug Chem, 1994, 5, 612-620; Tomiya et al., Bioorg Med Chem, 2013, 21, 5275-5281; International applications WO1998/013381; WO2011/038356; WO1997/046098; WO2008/098788; WO2004/101619; WO2012/037254; WO2011/120053; WO2011/100131; WO2011/163121; WO2012/177947; WO2013/033230; WO2013/075035; WO2012/083185; WO2012/083046; WO2009/082607; WO2009/134487; WO2010/144740; WO2010/148013; WO1997/020563; WO2010/088537; WO2002/043771; WO2010/129709; WO2012/068187; WO2009/126933; WO2004/024757; WO2010/054406; WO2012/089352; WO2012/089602; WO2013/166121; WO2013/165816; U.S. Pat. Nos. 4,751,219; 8,552,163; 6,908,903; 7,262,177; 5,994,517; 6,300,319; 8,106,022; 7,491,805; 7,491,805; 7,582,744; 8,137,695; 6,383,812; 6,525,031; 6,660,720; 7,723,509; 8,541,548; 8,344,125; 8,313,772; 8,349,308; 8,450,467; 8,501,930; 8,158,601; 7,262,177; 6,906,182; 6,620,916; 8,435,491; 8,404,862; 7,851,615; Published U.S. patent Application Publications US2011/0097264; US2011/0097265; US2013/0004427; US2005/0164235; US2006/0148740; US2008/0281044; US2010/0240730; US2003/0119724; US2006/0183886; US2008/0206869; US2011/0269814; US2009/0286973; US2011/0207799; US2012/0136042; US2012/0165393; US2008/0281041; US2009/0203135; US2012/0035115; US2012/0095075; US2012/0101148; US2012/0128760; US2012/0157509; US2012/0230938; US2013/0109817; US2013/0121954; US2013/0178512; US2013/0236968; US2011/0123520; US2003/0077829; US2008/0108801; and US2009/0203132; each of which is incorporated by reference in its entirety.

[0430] In certain embodiments, a modified oligonucleotide targeting DGAT2 described herein further comprises a GalNAc conjugate group. In certain embodiments, the GalNAc conjugate group is 5′-Trishexylamino-(THA)-C6 GalNAc₃. In certain embodiments, the 5′-Trishexylamino-(THA)-C6 GalNAc₃ conjugate has the formula

[chemical structure]

[0431] In certain embodiments, the modified oligonucleotide is linked to the 5′-Trishexylamino-(THA)-C6 GalNAc₃ conjugate by a cleavable moiety. In certain embodiments, the cleavable moiety is a phosphate group.

### Compositions and Methods for Formulating Pharmaceutical Compositions

[0432] In certain embodiments, the present invention provides pharmaceutical compositions comprising one or more antisense compound or a salt thereof. In certain such embodiments, the pharmaceutical composition comprises a suitable pharmaceutically acceptable diluent or carrier. In certain embodiments, a pharmaceutical composition comprises a sterile saline solution and one or more antisense compound. In certain embodiments, such pharmaceutical composition consists of a sterile saline solution and one or more antisense compound. In certain embodiments, the sterile saline is pharmaceutical grade saline. In certain embodiments, a pharmaceutical composition comprises one or more antisense compound and sterile water. In certain embodiments, a pharmaceutical composition consists of one antisense compound and sterile water. In certain embodiments, the sterile water is pharmaceutical grade water. In certain embodiments, a pharmaceutical composition comprises one or more antisense compound and phosphate-buffered saline (PBS). In certain embodiments, a pharmaceutical composition consists of one or more antisense compound and sterile PBS. In certain embodiments, the sterile PBS is pharmaceutical grade PBS. Compositions and methods for the formulation of pharmaceutical compositions are dependent upon a number of criteria, including, but not limited to, route of administration, extent of disease, or dose to be administered.

[0433] An antisense compound targeted to DGAT2 nucleic acid can be utilized in pharmaceutical compositions by combining the antisense compound with a suitable pharmaceutically acceptable diluent or carrier. In certain embodiments, a pharmaceutically acceptable diluent is water, such as sterile water suitable for injection. Accordingly, in one embodiment, employed in the methods described herein is a pharmaceutical composition comprising an antisense compound targeted to DGAT2 nucleic acid and a pharmaceutically acceptable diluent. In certain embodiments, the pharmaceutically acceptable diluent is water. In certain embodiments, the antisense compound is an antisense oligonucleotide provided herein.

[0434] Pharmaceutical compositions comprising antisense compounds encompass any pharmaceutically acceptable salts, esters, or salts of such esters, or any other oligonucleotide which, upon administration to an animal, including a human, is capable of providing (directly or indirectly) the biologically active metabolite or residue thereof. Accordingly, for example, the disclosure is also drawn to pharmaceutically acceptable salts of antisense compounds, prodrugs, pharmaceutically acceptable salts of such prodrugs, and other bioequivalents. Suitable pharmaceutically acceptable salts include, but are not limited to, sodium and potassium salts.

[0435] A prodrug can include the incorporation of additional nucleosides at one or both ends of an antisense compound which are cleaved by endogenous nucleases within the body, to form the active antisense compound.

[0436] In certain embodiments, the compounds or compositions further comprise a pharmaceutically acceptable carrier or diluent.

### Certain Compounds

[0437] In vitro screens in human HepG2 cells were performed with about 5,000 antisense oligonucleotides that exhibited 100% complementarity to a human DGAT2 gene sequence. The new compounds were compared with previously designed compounds, which have been previously determined to be some of the most potent antisense compounds in vitro (see, e.g. published PCT application WO 2005/019418). From these in vitro screens, several antisense oligonucleotides that exhibited the greatest potency in reducing the expression of human DGAT2 mRNA were selected for in vivo tolerability assays.

[0438] The selected oligonucleotides were tested for tolerability in a CD1 mouse model, as well as a Sprague-Dawley rat model. In these models, body weights and organ weights, liver function markers (such as alanine transaminase, aspartate transaminase, and bilirubin), and kidney function markers (such as BUN and creatinine) were measured.

[0439] Final evaluation of all studies (Examples 1-15) led to the selection of eight oligonucleotides having a nucleobase sequence of SEQ ID NO: 1371 (ISIS 484085), SEQ ID NO: 1415 (ISIS 484129), SEQ ID NO: 4680 (ISIS484137), SEQ ID NO: 1844 (ISIS 495576), SEQ ID NO: 2959 (ISIS 501861), SEQ ID NO: 3292 (ISIS 502194), SEQ ID NO: 4198 (ISIS 525443), and SEQ ID NO: 4373 (ISIS 525612). The compounds are complementary to the regions 23242-23261, 26630-26649, 26778-26797, 15251-15270, 28026-28045, 35436-35455, 10820-10836, and 23246-23262. In certain embodiments, the compounds targeting the listed regions, as further described herein, comprise a modified oligonucleotide having some nucleobase portion of the sequence recited in the SEQ ID Nos, as further described herein. In certain embodiments, the compounds targeting the listed regions or having a nucleobase portion of a sequence recited in the listed SEQ ID Nos can be of various lengths, as further described herein, and can have one of various motifs, as further described herein. In certain embodiments, a compound targeting a region or having a nucleobase portion of a sequence in the listed SEQ ID Nos has the specific length and motif, as indicated by the ISIS Nos: 484085, 484129, 484137, 495576, 501861, 502194, 525443, and 525612.

[0440] These eight compounds were tested for activity, pharmacokinetic profile and tolerability in cynomolgus monkeys (Example 16). Specifically, ISIS 484137 was found to be potent and the most tolerable in this monkey study. Further evaluation of ISIS 484137 in a separate monkey study (Example 17) confirmed this finding.

[0441] The nucleotide sequence of ISIS 484137 is fully homologous to the rhesus monkey DGAT2 mRNA transcript. The cynomolgus monkey is regarded as a relevant preclinical safety model system for oligonucleotide therapeutics and the demonstrated pharmacologic activity of ISIS 484137 in this species makes it an appropriate species for safety assessment. General toxicology studies were conducted with ISIS 484137 in monkeys for 13 weeks of treatment and it was well tolerated with no overt adverse effects and no changes in routine laboratory parameters. ISIS 484137 reduced the expression of hepatic DGAT2 by about 70%.

[0442] The findings observed in mice and monkey toxicology studies following 13-weeks of ISIS 484137 treatment were, in general, non-specific class effects that are typical for 2′-MOE ASOs. There was no drug-related mortality or changes in clinical signs up to the highest doses tested (100 mg/kg in mice and 40 mg/kg in monkeys). There were no toxicologically significant findings at doses up to 12 mg/kg/wk for 13 weeks in the mouse and monkey studies, and therefore there is sufficient therapeutic margin to support the safe clinical use of ISIS 484137 at the proposed clinical doses and regimen.

[0443] The pharmacokinetic results confirm continuous and dose-dependent exposure to ISIS 484137 in the 13-week mouse and monkey studies. Pharmacokinetics observed in monkeys for antisense oligonucleotides typically well predict the observed plasma (and expected tissue) exposure levels in humans on the basis of mg/kg equivalent doses (Geary et al. 2003; 31:1419-1428; Yu et al. Drug Metab Dispos 2007; 35:460-468).

[0444] Thus, reduction of DGAT2 expression with ISIS 484137 provides a mechanism to reduce hepatic steatosis, thereby potentially attenuating subsequent inflammation and fibrosis. This mechanism of action could offer an attractive treatment option for patients who have significant hepatic steatosis associated with NAFLD and NASH.

### EXAMPLES

[0445] The Examples below describe the screening process to identify the lead compounds targeted to DGAT2. Out of about 5,000 antisense oligonucleotides screened, ISIS 484085, ISIS 484129, ISIS 484137, ISIS 495576, ISIS 501861, ISIS 502194, ISIS 525443, and ISIS 525612 emerged as the top lead compounds. In particular, ISIS 484137 exhibited the best combination of properties in terms of potency and tolerability for DGAT2 out of about 5,000 antisense oligonucleotides.

### Non-Limiting Disclosure and Incorporation by Reference

[0446] Although the sequence listing accompanying this filing identifies each sequence as either “RNA” or “DNA” as required, in reality, those sequences may be modified with any combination of chemical modifications. One of skill in the art will readily appreciate that such designation as “RNA” or “DNA” to describe modified oligonucleotides is, in certain instances, arbitrary. For example, an oligonucleotide comprising a nucleoside comprising a 2′-OH sugar moiety and a thymine base could be described as a DNA having a modified sugar (2′-OH for the natural 2′-H of DNA) or as an RNA having a modified base (thymine(methylated uracil) for natural uracil of RNA).

[0447] Accordingly, nucleic acid sequences provided herein, including, but not limited to those in the sequence listing, are intended to encompass nucleic acids containing any combination of natural or modified RNA and/or DNA, including, but not limited to such nucleic acids having modified nucleobases. By way of further example and without limitation, an oligonucleotide having the nucleobase sequence “ATCGATCG” encompasses any oligonucleotides having such nucleobase sequence, whether modified or unmodified, including, but not limited to, such compounds comprising RNA bases, such as those having sequence “AUCGAUCG” and those having some DNA bases and some RNA bases such as “AUCGATCG”.

[0448] While certain compounds, compositions and methods described herein have been described with specificity in accordance with certain embodiments, the following examples serve only to illustrate the compounds described herein and are not intended to limit the same. Each of the references recited in the present application is incorporated herein by reference in its entirety.

### Example 1: Antisense Inhibition of Human Diacylglycerol Acyltransferase 2 in HepG2 Cells by MOE Gapmers

[0449] Antisense oligonucleotides were designed targeting a diacylglycerol acyltransferase 2 (DGAT2) nucleic acid and were tested for their effects on DGAT2 mRNA in vitro. The antisense oligonucleotides were tested in a series of experiments that had similar culture conditions. The results for each experiment are presented in separate tables shown below. Cultured HepG2 cells at a density of 10,000 cells per well were transfected using Lipofectin reagent with 120 nM antisense oligonucleotide. After a treatment period of approximately 24 hours, RNA was isolated from the cells and DGAT2 mRNA levels were measured by quantitative real-time PCR. Human primer probe set RTS2367 (forward sequence GGCCTCCCGGAGACTGA, designated herein as SEQ ID NO: 4; reverse sequence AAGTGATTTGCAGCTGGTTCCT, designated herein as SEQ ID NO: 5; probe sequence AGGTGAACTGAGCCAGCCTTCGGG, designated herein as SEQ ID NO: 6) was used to measure mRNA levels. DGAT2 mRNA levels were adjusted according to total RNA content, as measured by RIBOGREEN®. Results are presented as percent inhibition of DGAT2, relative to untreated control cells.

[0450] ISIS oligonucleotides from an earlier published application, WO 2005/019418, were also included in this assay. These ISIS oligonucleotides are ISIS 217312-217322, ISIS 217324, ISIS 217325, ISIS 217328, ISIS 217333, ISIS 217336-217339, ISIS 217341-217343, ISIS 217346-217348, ISIS 217353-217355, ISIS 334177, ISIS 366710, ISIS 366714, ISIS 366722, ISIS 366728, ISIS 366730, ISIS 366741, ISIS 366746, ISIS 369220, ISIS 369221, ISIS 369255, ISIS 370727, ISIS 370747, ISIS 370784.

[0451] The newly designed chimeric antisense oligonucleotides in the Tables below were designed as 5-10-5 MOE gapmers. The gapmers are 20 nucleosides in length, wherein the central gap segment comprises of ten 2′-deoxynucleosides and is flanked by wing segments on the 5′ direction and the 3′ direction comprising five nucleosides each. Each nucleoside in the 5′ wing segment and each nucleoside in the 3′ wing segment has a 2′-MOE modification. The internucleoside linkages throughout each gapmer are phosphorothioate (P═S) linkages. All cytosine residues throughout each gapmer are 5-methylcytosines. “Start site” indicates the 5′-most nucleoside to which the gapmer is targeted in the human gene sequence. “Stop site” indicates the 3′-most nucleoside to which the gapmer is targeted in the human gene sequence. Each gapmer listed in the Tables below is targeted to either the human DGAT2 mRNA, designated herein as SEQ ID NO: 1 (Ref Seq No. NM_032564.3) or the human DGAT2 genomic sequence, designated herein as SEQ ID NO: 2 (Ref Seq No. NT 033927.5 truncated from nucleotides 5669186 to 5712008). ‘n/a’ indicates that the antisense oligonucleotide does not target that particular gene sequence with 100% complementarity.

TABLE 1
Inhibition of DGAT2 mRNA by 5-10-5 MOE
gapmers targeting SEQ ID NO: 1 and 2

| | SEQ | SEQ | | | SEQ | SEQ | |
|---|---|---|---|---|---|---|---|
| | ID | ID | | % | ID | ID | |
| | NO: | NO: | | in- | NO: | NO: | |
| | 1 | 1 | | hi- | 2 | 2 | SEQ |
| ISIS | Start | Stop | | bi- | Start | Stop | ID |
| NO | Site | Site | Sequence | tion | Site | Site | NO |
| 381726 | 278 | 297 | CGCAGGACCC | 75 | 9899 | 9918 | 38 |
| | | | CGGAGTAGGC | | | | |
| 217312 | 668 | 687 | TGGATGGGAA | 40 | 31600 | 31619 | 16 |
| | | | AGTAGTCTCG | | | | |
| 411887 | 669 | 688 | CTGGATGGGA | 38 | 31601 | 31620 | 50 |
| | | | AAGTAGTCTC | | | | |
| 411888 | 670 | 689 | GCTGGATGGG | 22 | n/a | n/a | 51 |
| | | | AAAGTAGTCT | | | | |
| 411889 | 671 | 690 | AGCTGGATGG | 31 | n/a | n/a | 52 |
| | | | GAAAGTAGTC | | | | |
| 411890 | 672 | 691 | CAGCTGGATG | 21 | n/a | n/a | 53 |
| | | | GGAAAGTAGT | | | | |
| 217313 | 673 | 692 | CCAGCTGGAT | 24 | n/a | n/a | 17 |
| | | | GGGAAAGTAG | | | | |
| 411891 | 674 | 693 | ACCAGCTGGA | 21 | n/a | n/a | 54 |
| | | | TGGGAAAGTA | | | | |
| 380109 | 675 | 694 | CACCAGCTGG | 31 | n/a | n/a | 35 |
| | | | ATGGGAAAGT | | | | |
| 411892 | 676 | 695 | TCACCAGCTG | 22 | n/a | n/a | 55 |
| | | | GATGGGAAAG | | | | |
| 411893 | 677 | 696 | TTCACCAGCT | 26 | n/a | n/a | 56 |
| | | | GGATGGGAAA | | | | |
| 217314 | 678 | 697 | CTTCACCAGC | 36 | n/a | n/a | 18 |
| | | | TGGATGGGAA | | | | |
| 369219 | 679 | 698 | TCTTCACCAG | 50 | n/a | n/a | 32 |
| | | | CTGGATGGGA | | | | |
| 411894 | 680 | 699 | GTCTTCACCA | 42 | n/a | n/a | 57 |
| | | | GCTGGATGGG | | | | |
| 411895 | 681 | 700 | TGTCTTCACC | 55 | n/a | n/a | 58 |
| | | | AGCTGGATGG | | | | |
| 411896 | 682 | 701 | GTGTCTTCAC | 49 | n/a | n/a | 59 |
| | | | CAGCTGGATG | | | | |
| 217315 | 683 | 702 | TGTGTCTTCA | 55 | n/a | n/a | 19 |
| | | | CCAGCTGGAT | | | | |
| 380110 | 684 | 703 | GTGTGTCTTC | 53 | n/a | n/a | 36 |
| | | | ACCAGCTGGA | | | | |
| 411897 | 685 | 704 | TGTGTGTCTT | 55 | n/a | n/a | 60 |
| | | | CACCAGCTGG | | | | |
| 411873 | 686 | 705 | TTGTGTGTCT | 63 | 37214 | 37233 | 46 |
| | | | TCACCAGCTG | | | | |
| 411898 | 687 | 706 | GTTGTGTGTC | 54 | 37215 | 37234 | 61 |
| | | | TTCACCAGCT | | | | |
| 217316 | 688 | 707 | GGTTGTGTGT | 64 | 37216 | 37235 | 20 |
| | | | CTTCACCAGC | | | | |
| 381727 | 689 | 708 | AGGTTGTGTG | 59 | 37217 | 37236 | 39 |
| | | | TCTTCACCAG | | | | |
| 411899 | 690 | 709 | CAGGTTGTGT | 68 | 37218 | 37237 | 62 |
| | | | GTCTTCACCA | | | | |
| 411874 | 691 | 710 | GCAGGTTGTG | 65 | 37219 | 37238 | 47 |
| | | | TGTCTTCACC | | | | |
| 411900 | 692 | 711 | AGCAGGTTGT | 55 | 37220 | 37239 | 63 |
| | | | GTGTCTTCAC | | | | |
| 217317 | 693 | 712 | CAGCAGGTTG | 66 | 37221 | 37240 | 21 |
| | | | TGTGTCTTCA | | | | |
| 381728 | 694 | 713 | TCAGCAGGTT | 56 | 37222 | 37241 | 40 |
| | | | GTGTGTCTTC | | | | |
| 411901 | 695 | 714 | GTCAGCAGGT | 64 | 37223 | 37242 | 64 |
| | | | TGTGTGTCTT | | | | |
| 411875 | 696 | 715 | GGTCAGCAGG | 45 | 37224 | 37243 | 48 |
| | | | TTGTGTGTCT | | | | |
| 411902 | 697 | 716 | TGGTCAGCAG | 55 | 37225 | 37244 | 65 |
| | | | GTTGTGTGTC | | | | |
| 217318 | 698 | 717 | GTGGTCAGCA | 44 | 37226 | 37245 | 22 |
| | | | GGTTGTGTGT | | | | |
| 369220 | 699 | 718 | GGTGGTCAGC | 29 | 37227 | 37246 | 33 |
| | | | AGGTTGTGTG | | | | |
| 411903 | 700 | 719 | TGGTGGTCAG | 51 | 37228 | 37247 | 66 |
| | | | CAGGTTGTGT | | | | |
| 411904 | 701 | 720 | CTGGTGGTCA | 57 | 37229 | 37248 | 67 |
| | | | GCAGGTTGTG | | | | |
| 411905 | 702 | 721 | CCTGGTGGTC | 64 | 37230 | 37249 | 68 |
| | | | AGCAGGTTGT | | | | |
| 217319 | 703 | 722 | TCCTGGTGGT | 58 | 37231 | 37250 | 23 |
| | | | CAGCAGGTTG | | | | |
| 381729 | 704 | 723 | TTCCTGGTGG | 61 | 37232 | 37251 | 41 |
| | | | TCAGCAGGTT | | | | |
| 411906 | 705 | 724 | GTTCCTGGTG | 63 | 37233 | 37252 | 69 |
| | | | GTCAGCAGGT | | | | |
| 411907 | 706 | 725 | AGTTCCTGGT | 58 | 37234 | 37253 | 70 |
| | | | GGTCAGCAGG | | | | |
| 411908 | 707 | 726 | TAGTTCCTGG | 48 | 37235 | 37254 | 71 |
| | | | TGGTCAGCAG | | | | |
| 217320 | 708 | 727 | ATAGTTCCTG | 46 | 37236 | 37255 | 24 |
| | | | GTGGTCAGCA | | | | |
| 381730 | 709 | 728 | TATAGTTCCT | 56 | 37237 | 37256 | 42 |
| | | | GGTGGTCAGC | | | | |
| 411909 | 710 | 729 | ATATAGTTCC | 53 | 37238 | 37257 | 72 |
| | | | TGGTGGTCAG | | | | |
| 411876 | 711 | 730 | GATATAGTTC | 57 | 37239 | 37258 | 49 |
| | | | CTGGTGGTCA | | | | |
| 411910 | 712 | 731 | AGATATAGTT | 56 | 37240 | 37259 | 73 |
| | | | CCTGGTGGTC | | | | |
| 217321 | 713 | 732 | AAGATATAGT | 41 | 37241 | 37260 | 25 |
| | | | TCCTGGTGGT | | | | |
| 381731 | 714 | 733 | AAAGATATAG | 54 | 37242 | 37261 | 43 |
| | | | TTCCTGGTGG | | | | |
| 411911 | 715 | 734 | CAAAGATATA | 61 | 37243 | 37262 | 74 |
| | | | GTTCCTGGTG | | | | |
| 411912 | 716 | 735 | CCAAAGATAT | 66 | 37244 | 37263 | 75 |
| | | | AGTTCCTGGT | | | | |
| 411913 | 717 | 736 | TCCAAAGATA | 63 | 37245 | 37264 | 76 |
| | | | TAGTTCCTGG | | | | |
| 217322 | 718 | 737 | ATCCAAAGAT | 39 | 37246 | 37265 | 26 |
| | | | ATAGTTCCTG | | | | |
| 369221 | 719 | 738 | TATCCAAAGA | 13 | 37247 | 37266 | 34 |
| | | | TATAGTTCCT | | | | |
| 411914 | 720 | 739 | GTATCCAAAG | 8 | 37248 | 37267 | 77 |
| | | | ATATAGTTCC | | | | |
| 411915 | 721 | 740 | GGTATCCAAA | 43 | 37249 | 37268 | 78 |
| | | | GATATAGTTC | | | | |
| 411916 | 722 | 741 | TGGTATCCAA | 42 | 37250 | 37269 | 79 |
| | | | AGATATAGTT | | | | |
| 217324 | 752 | 771 | AAGGCACCCA | 46 | 37280 | 37299 | 27 |
| | | | GGCCCATGAT | | | | |
| 381732 | 753 | 772 | GAAGGCACCC | 38 | 37281 | 37300 | 44 |
| | | | AGGCCCATGA | | | | |
| 380114 | 754 | 773 | AGAAGGCACC | 38 | 37282 | 37301 | 37 |
| | | | CAGGCCCATG | | | | |
| 411917 | 755 | 774 | CAGAAGGCAC | 33 | 37283 | 37302 | 80 |
| | | | CCAGGCCCAT | | | | |
| 217325 | 875 | 894 | CCTCCAGACA | 29 | 37403 | 37422 | 28 |
| | | | TCAGGTACTC | | | | |
| 217333 | 992 | 1011 | TTGCCAGGCA | 37 | 38145 | 38164 | 29 |
| | | | TGGAGCTCAG | | | | |
| 381733 | 993 | 1012 | CTTGCCAGGC | 51 | 38146 | 38165 | 45 |
| | | | ATGGAGCTCA | | | | |
| 411918 | 994 | 1013 | TCTTGCCAGG | 47 | 38147 | 38166 | 81 |
| | | | CATGGAGCTC | | | | |
| 411919 | 995 | 1014 | TTCTTGCCAG | 54 | 38148 | 38167 | 82 |
| | | | GCATGGAGCT | | | | |
| 217336 | 1139 | 1158 | TGGACCCATC | 52 | 39186 | 39205 | 30 |
| | | | GGCCCCAGGA | | | | |
| 411920 | 1140 | 1159 | CTGGACCCAT | 41 | 39187 | 39206 | 83 |
| | | | CGGCCCCAGG | | | | |
| 411921 | 1141 | 1160 | TCTGGACCCA | 20 | 39188 | 39207 | 84 |
| | | | TCGGCCCCAG | | | | |
| 411922 | 1142 | 1161 | TTCTGGACCC | 27 | 39189 | 39208 | 85 |
| | | | ATCGGCCCCA | | | | |
| 411923 | 1143 | 1162 | CTTCTGGACC | 30 | 39190 | 39209 | 86 |
| | | | CATCGGCCCC | | | | |
| 217337 | 1144 | 1163 | TCTTCTGGAC | 37 | 39191 | 39210 | 31 |
| | | | CCATCGGCCC | | | | |
| 411924 | 1145 | 1164 | TTCTTCTGGA | 44 | 39192 | 39211 | 87 |
| | | | CCCATCGGCC | | | | |
| 411925 | 1146 | 1165 | CTTCTTCTGG | 27 | 39193 | 39212 | 88 |
| | | | ACCCATCGGC | | | | |
| 411926 | 1147 | 1166 | ACTTCTTCTG | 28 | 39194 | 39213 | 89 |
| | | | GACCCATCGG | | | | |
| 411927 | 1148 | 1167 | AACTTCTTCT | 28 | 39195 | 39214 | 90 |
| | | | GGACCCATCG | | | | |

TABLE 2
Inhibition of DGAT2 mRNA by 5-10-5 MOE
gapmers targeting SEQ ID NO: 1 and 2

| | SEQ | SEQ | | | SEQ | SEQ | |
|---|---|---|---|---|---|---|---|
| | ID | ID | | % | ID | ID | |
| | NO: | NO: | | in- | NO: | NO: | |
| | 1 | 1 | | hi- | 2 | 2 | SEQ |
| ISIS | Start | Stop | | bi- | Start | Stop | ID |
| NO | Site | Site | Sequence | tion | Site | Site | NO |
| 217338 | 1149 | 1168 | GAACTTCTTC | 19 | 39196 | 39215 | 91 |
| | | | TGGACCCATC | | | | |
| 411928 | 1150 | 1169 | GGAACTTCTT | 36 | 39197 | 39216 | 104 |
| | | | CTGGACCCAT | | | | |
| 411929 | 1151 | 1170 | TGGAACTTCT | 43 | 39198 | 39217 | 105 |
| | | | TCTGGACCCA | | | | |
| 411930 | 1152 | 1171 | CTGGAACTTC | 25 | 39199 | 39218 | 106 |
| | | | TTCTGGACCC | | | | |
| 411931 | 1153 | 1172 | TCTGGAACTT | 43 | 39200 | 39219 | 107 |
| | | | CTTCTGGACC | | | | |
| 217339 | 1154 | 1173 | TTCTGGAACT | 37 | 39201 | 39220 | 92 |
| | | | TCTTCTGGAC | | | | |
| 217341 | 1226 | 1245 | GGCACCAGCC | 30 | 39273 | 39292 | 93 |
| | | | CCCAGGTGTC | | | | |
| 411932 | 1227 | 1246 | GGGCACCAGC | 34 | 39274 | 39293 | 108 |
| | | | CCCCAGGTGT | | | | |
| 411933 | 1228 | 1247 | AGGGCACCAG | 29 | 39275 | 39294 | 109 |
| | | | CCCCCAGGTG | | | | |
| 411934 | 1229 | 1248 | TAGGGCACCA | 32 | 39276 | 39295 | 110 |
| | | | GCCCCCAGGT | | | | |
| 411935 | 1230 | 1249 | GTAGGGCACC | 23 | 39277 | 39296 | 111 |
| | | | AGCCCCCAGG | | | | |
| 217342 | 1231 | 1250 | AGTAGGGCAC | 0 | 39278 | 39297 | 94 |
| | | | CAGCCCCCAG | | | | |
| 411936 | 1232 | 1251 | GAGTAGGGCA | 0 | 39279 | 39298 | 112 |
| | | | CCAGCCCCCA | | | | |
| 411937 | 1233 | 1252 | GGAGTAGGGC | 17 | 39280 | 39299 | 113 |
| | | | ACCAGCCCCC | | | | |
| 411938 | 1234 | 1253 | TGGAGTAGGG | 28 | 39281 | 39300 | 114 |
| | | | CACCAGCCCC | | | | |
| 411939 | 1235 | 1254 | TTGGAGTAGG | 16 | 39282 | 39301 | 115 |
| | | | GCACCAGCCC | | | | |
| 217343 | 1236 | 1255 | CTTGGAGTAG | 35 | 39283 | 39302 | 95 |
| | | | GGCACCAGCC | | | | |
| 411940 | 1237 | 1256 | GCTTGGAGTA | 45 | 39284 | 39303 | 116 |
| | | | GGGCACCAGC | | | | |
| 411941 | 1238 | 1257 | GGCTTGGAGT | 56 | 39285 | 39304 | 117 |
| | | | AGGGCACCAG | | | | |
| 366741 | 1245 | 1264 | GGTGATGGGC | 36 | 39292 | 39311 | 102 |
| | | | TTGGAGTAGG | | | | |
| 411942 | 1246 | 1265 | TGGTGATGGG | 28 | 39293 | 39312 | 118 |
| | | | CTTGGAGTAG | | | | |
| 411943 | 1247 | 1266 | GTGGTGATGG | 23 | 39294 | 39313 | 119 |
| | | | GCTTGGAGTA | | | | |
| 217346 | 1338 | 1357 | CAGGGCCTCC | 37 | 41309 | 41328 | 96 |
| | | | ATGTACATGG | | | | |
| 369255 | 1339 | 1358 | CCAGGGCCTC | 38 | 41310 | 41329 | 103 |
| | | | CATGTACATG | | | | |
| 411944 | 1340 | 1359 | ACCAGGGCCT | 52 | 41311 | 41330 | 120 |
| | | | CCATGTACAT | | | | |
| 411945 | 1341 | 1360 | CACCAGGGCC | 53 | 41312 | 41331 | 121 |
| | | | TCCATGTACA | | | | |
| 411946 | 1342 | 1361 | TCACCAGGGC | 37 | 41313 | 41332 | 122 |
| | | | CTCCATGTAC | | | | |
| 217347 | 1343 | 1362 | TTCACCAGGG | 20 | 41314 | 41333 | 97 |
| | | | CCTCCATGTA | | | | |
| 411947 | 1344 | 1363 | CTTCACCAGG | 46 | 41315 | 41334 | 123 |
| | | | GCCTCCATGT | | | | |
| 411948 | 1345 | 1364 | GCTTCACCAG | 31 | 41316 | 41335 | 124 |
| | | | GGCCTCCATG | | | | |
| 411949 | 1346 | 1365 | AGCTTCACCA | 42 | 41317 | 41336 | 125 |
| | | | GGGCCTCCAT | | | | |
| 411950 | 1347 | 1366 | GAGCTTCACC | 52 | 41318 | 41337 | 126 |
| | | | AGGGCCTCCA | | | | |
| 217348 | 1348 | 1367 | AGAGCTTCAC | 46 | 41319 | 41338 | 98 |
| | | | CAGGGCCTCC | | | | |
| 411951 | 1349 | 1368 | AAGAGCTTCA | 44 | 41320 | 41339 | 127 |
| | | | CCAGGGCCTC | | | | |
| 217353 | 1498 | 1517 | AACCCACAGA | 4 | 41469 | 41488 | 99 |
| | | | CACCCATGAC | | | | |
| 411952 | 1499 | 1518 | TAACCCACAG | 14 | 41470 | 41489 | 128 |
| | | | ACACCCATGA | | | | |
| 411953 | 1500 | 1519 | ATAACCCACA | 24 | 41471 | 41490 | 129 |
| | | | GACACCCATG | | | | |
| 411954 | 1501 | 1520 | AATAACCCAC | 0 | 41472 | 41491 | 130 |
| | | | AGACACCCAT | | | | |
| 411955 | 1502 | 1521 | AAATAACCCA | 10 | 41473 | 41492 | 131 |
| | | | CAGACACCCA | | | | |
| 217354 | 1503 | 1522 | TAAATAACCC | 6 | 41474 | 41493 | 100 |
| | | | ACAGACACCC | | | | |
| 411956 | 1504 | 1523 | TTAAATAACC | 0 | 41475 | 41494 | 132 |
| | | | CACAGACACC | | | | |
| 411957 | 1505 | 1524 | TTTAAATAAC | 14 | 41476 | 41495 | 133 |
| | | | CCACAGACAC | | | | |
| 411958 | 1506 | 1525 | TTTTAAATAA | 10 | 41477 | 41496 | 134 |
| | | | CCCACAGACA | | | | |
| 411959 | 1507 | 1526 | CTTTTAAATA | 0 | 41478 | 41497 | 135 |
| | | | ACCCACAGAC | | | | |
| 217355 | 1508 | 1527 | TCTTTTAAAT | 10 | 41479 | 41498 | 101 |
| | | | AACCCACAGA | | | | |
| 411960 | 1509 | 1528 | TTCTTTTAAA | 8 | 41480 | 41499 | 136 |
| | | | TAACCCACAG | | | | |
| 411961 | 1510 | 1529 | TTTCTTTTAA | 1 | 41481 | 41500 | 137 |
| | | | ATAACCCACA | | | | |
| 411962 | 1511 | 1530 | ATTTCTTTTA | 1 | 41482 | 41501 | 138 |
| | | | AATAACCCAC | | | | |
| 411963 | 1512 | 1531 | AATTTCTTTT | 0 | 41483 | 41502 | 139 |
| | | | AAATAACCCA | | | | |
| 411964 | 1513 | 1532 | TAATTTCTTT | 0 | 41484 | 41503 | 140 |
| | | | TAAATAACCC | | | | |
| 411965 | 1514 | 1533 | ATAATTTCTT | 0 | 41485 | 41504 | 141 |
| | | | TTAAATAACC | | | | |
| 411966 | 1515 | 1534 | TATAATTTCT | 0 | 41486 | 41505 | 142 |
| | | | TTTAAATAAC | | | | |
| 411967 | 1516 | 1535 | TTATAATTTC | 0 | 41487 | 41506 | 143 |
| | | | TTTTAAATAA | | | | |

TABLE 3
Inhibition of DGAT2 mRNA by MOE
gapmers targeting SEQ ID NO: 1 and 2

| | SEQ | SEQ | | | | SEQ | SEQ | |
|---|---|---|---|---|---|---|---|---|
| | ID | ID | | | % | ID | ID | |
| | NO: | NO: | | | in- | NO: | NO: | |
| | 1 | 1 | | | hi- | 2 | 2 | SEQ |
| ISIS | Start | Stop | | | bi- | Start | Stop | ID |
| NO | Site | Site | Sequence | Motif | tion | Site | Site | NO |
| 413166 | 254 | 273 | ATGAGGGTCT | 5-10-5 | 7 | 9875 | 9894 | 156 |
| | | | TCATGGCTGA | | | | | |
| 413167 | 266 | 285 | GAGTAGGCGG | 5-10-5 | 11 | 9887 | 9906 | 157 |
| | | | CTATGAGGGT | | | | | |
| 413168 | 269 | 288 | CCGGAGTAGG | 5-10-5 | 37 | 9890 | 9909 | 158 |
| | | | CGGCTATGAG | | | | | |
| 413169 | 272 | 291 | ACCCCGGAGT | 5-10-5 | 46 | 9893 | 9912 | 159 |
| | | | AGGCGGCTAT | | | | | |
| 334177 | 275 | 294 | AGGACCCCGG | 5-10-5 | 52 | 9896 | 9915 | 145 |
| | | | AGTAGGCGGC | | | | | |
| 413170 | 304 | 323 | GGTCAGCCTC | 5-10-5 | 11 | 9925 | 9944 | 160 |
| | | | GGCCTGACGC | | | | | |
| 413171 | 307 | 326 | TCCGGTCAGC | 5-10-5 | 20 | 9928 | 9947 | 161 |
| | | | CTCGGCCTGA | | | | | |
| 413172 | 310 | 329 | GGCTCCGGTC | 5-10-5 | 0 | 9931 | 9950 | 162 |
| | | | AGCCTCGGCC | | | | | |
| 413173 | 331 | 350 | CAGGTCCTCC | 5-10-5 | 29 | 9952 | 9971 | 163 |
| | | | GTGAGAGCGC | | | | | |
| 413174 | 339 | 358 | CGACAGCGCA | 5-10-5 | 48 | 9960 | 9979 | 164 |
| | | | GGTCCTCCGT | | | | | |
| 413175 | 348 | 367 | CCCCTCGCGC | 5-10-5 | 25 | 9969 | 9988 | 165 |
| | | | GACAGCGCAG | | | | | |
| 413176 | 355 | 374 | TCCCAGACCC | 5-10-5 | 36 | 9976 | 9995 | 166 |
| | | | CTCGCGCGAC | | | | | |
| 413177 | 361 | 380 | CCCATCTCCC | 5-10-5 | 12 | 9982 | 10001 | 167 |
| | | | AGACCCCTCG | | | | | |
| 413178 | 367 | 386 | CAGTGCCCCA | 5-10-5 | 0 | n/a | n/a | 168 |
| | | | TCTCCCAGAC | | | | | |
| 413179 | 370 | 389 | ATCCAGTGCC | 5-10-5 | 16 | n/a | n/a | 169 |
| | | | CCATCTCCCA | | | | | |
| 413180 | 376 | 395 | TGCTGGATCC | 5-10-5 | 44 | n/a | n/a | 170 |
| | | | AGTGCCCCAT | | | | | |
| 413181 | 379 | 398 | GGATGCTGGA | 5-10-5 | 32 | n/a | n/a | 171 |
| | | | TCCAGTGCCC | | | | | |
| 413182 | 382 | 401 | AGAGGATGCT | 5-10-5 | 45 | 25508 | 25527 | 172 |
| | | | GGATCCAGTG | | | | | |
| 413183 | 385 | 404 | CGGAGAGGAT | 5-10-5 | 47 | 25511 | 25530 | 173 |
| | | | GCTGGATCCA | | | | | |
| 413184 | 396 | 415 | GTCCTGGAGG | 5-10-5 | 32 | 25522 | 25541 | 174 |
| | | | GCGGAGAGGA | | | | | |
| 413185 | 404 | 423 | GAGAAGAGGT | 5-10-5 | 10 | 25530 | 25549 | 175 |
| | | | CCTGGAGGGC | | | | | |
| 366710 | 425 | 444 | GACCTATTGA | 5-10-5 | 36 | 25551 | 25570 | 146 |
| | | | GCCAGGTGAC | | | | | |
| 370727 | 443 | 462 | AGCTGCTTTT | 2-16-2 | 45 | 25569 | 25588 | 152 |
| | | | CCACCTTGGA | | | | | |
| 366714 | 445 | 464 | GTAGCTGCTT | 5-10-5 | 43 | 25571 | 25590 | 147 |
| | | | TTCCACCTTG | | | | | |
| 413186 | 448 | 467 | CCTGTAGCTG | 5-10-5 | 29 | 25574 | 25593 | 176 |
| | | | CTTTTCCACC | | | | | |
| 413187 | 451 | 470 | TGACCTGTAG | 5-10-5 | 35 | 25577 | 25596 | 177 |
| | | | CTGCTTTTCC | | | | | |
| 413188 | 455 | 474 | GAGATGACCT | 5-10-5 | 34 | 25581 | 25600 | 178 |
| | | | GTAGCTGCTT | | | | | |
| 413189 | 458 | 477 | ACTGAGATGA | 5-10-5 | 33 | 25584 | 25603 | 179 |
| | | | CCTGTAGCTG | | | | | |
| 413190 | 461 | 480 | AGCACTGAGA | 5-10-5 | 36 | 25587 | 25606 | 180 |
| | | | TGACCTGTAG | | | | | |
| 413191 | 467 | 486 | CACTGGAGCA | 5-10-5 | 27 | 25593 | 25612 | 181 |
| | | | CTGAGATGAC | | | | | |
| 413192 | 473 | 492 | AGGACCCACT | 5-10-5 | 40 | 25599 | 25618 | 182 |
| | | | GGAGCACTGA | | | | | |
| 413193 | 476 | 495 | GACAGGACCC | 5-10-5 | 44 | 25602 | 25621 | 183 |
| | | | ACTGGAGCAC | | | | | |
| 380089 | 482 | 501 | AGGAAGGACA | 5-10-5 | 38 | 25608 | 25627 | 155 |
| | | | GGACCCACTG | | | | | |
| 413194 | 494 | 513 | ACTCCCAGTA | 5-10-5 | 3 | n/a | n/a | 184 |
| | | | CAAGGAAGGA | | | | | |
| 413195 | 497 | 516 | GCCACTCCCA | 5-10-5 | 0 | n/a | n/a | 185 |
| | | | GTACAAGGAA | | | | | |
| 413196 | 500 | 519 | CAGGCCACTC | 5-10-5 | 1 | n/a | n/a | 186 |
| | | | CCAGTACAAG | | | | | |
| 413197 | 503 | 522 | CTGCAGGCCA | 5-10-5 | 40 | n/a | n/a | 187 |
| | | | CTCCCAGTAC | | | | | |
| 413198 | 506 | 525 | GCACTGCAGG | 5-10-5 | 37 | n/a | n/a | 188 |
| | | | CCACTCCCAG | | | | | |
| 413199 | 510 | 529 | GATGGCACTG | 5-10-5 | 28 | 31077 | 31096 | 189 |
| | | | CAGGCCACTC | | | | | |
| 366722 | 530 | 549 | GTGCAGAATA | 5-10-5 | 43 | 31097 | 31116 | 148 |
| | | | TGTACATGAG | | | | | |
| 413200 | 554 | 573 | AGCACAGCGA | 5-10-5 | 35 | 31121 | 31140 | 190 |
| | | | TGAGCCAGCA | | | | | |
| 413201 | 570 | 589 | CAGCCAAGTG | 5-10-5 | 41 | 31137 | 31156 | 191 |
| | | | AAGTAGAGCA | | | | | |
| 413202 | 573 | 592 | CACCAGCCAA | 5-10-5 | 23 | 31140 | 31159 | 192 |
| | | | GTGAAGTAGA | | | | | |
| 413203 | 576 | 595 | AAACACCAGC | 5-10-5 | 9 | 31143 | 31162 | 193 |
| | | | CAAGTGAAGT | | | | | |
| 413204 | 579 | 598 | GTCAAACACC | 5-10-5 | 15 | 31146 | 31165 | 194 |
| | | | AGCCAAGTGA | | | | | |
| 413205 | 585 | 604 | GTTCCAGTCA | 5-10-5 | 31 | 31152 | 31171 | 195 |
| | | | AACACCAGCC | | | | | |
| 413206 | 588 | 607 | TGTGTTCCAG | 5-10-5 | 23 | 31155 | 31174 | 196 |
| | | | TCAAACACCA | | | | | |
| 413207 | 591 | 610 | GGGTGTGTTC | 5-10-5 | 6 | 31158 | 31177 | 197 |
| | | | CAGTCAAACA | | | | | |
| 413208 | 594 | 613 | CTTGGGTGTG | 5-10-5 | 5 | 31161 | 31180 | 198 |
| | | | TTCCAGTCAA | | | | | |
| 413209 | 615 | 634 | CTGTGACCTC | 5-10-5 | 25 | 31547 | 31566 | 199 |
| | | | CTGCCACCTT | | | | | |
| 413210 | 618 | 637 | CCACTGTGAC | 5-10-5 | 30 | 31550 | 31569 | 200 |
| | | | CTCCTGCCAC | | | | | |
| 413211 | 621 | 640 | GACCCACTGT | 5-10-5 | 25 | 31553 | 31572 | 201 |
| | | | GACCTCCTGC | | | | | |
| 413212 | 625 | 644 | TTCGGACCCA | 5-10-5 | 38 | 31557 | 31576 | 202 |
| | | | CTGTGACCTC | | | | | |
| 413213 | 629 | 648 | CAGTTTCGGA | 5-10-5 | 39 | 31561 | 31580 | 203 |
| | | | CCCACTGTGA | | | | | |
| 413214 | 632 | 651 | GCCCAGTTTC | 5-10-5 | 51 | 31564 | 31583 | 204 |
| | | | GGACCCACTG | | | | | |
| 413215 | 635 | 654 | ACAGCCCAGT | 5-10-5 | 27 | 31567 | 31586 | 205 |
| | | | TTCGGACCCA | | | | | |
| 413216 | 638 | 657 | CACACAGCCC | 5-10-5 | 24 | 31570 | 31589 | 206 |
| | | | AGTTTCGGAC | | | | | |
| 413217 | 642 | 661 | GCGCCACACA | 5-10-5 | 31 | 31574 | 31593 | 207 |
| | | | GCCCAGTTTC | | | | | |
| 413218 | 658 | 677 | AGTAGTCTCG | 5-10-5 | 39 | 31590 | 31609 | 208 |
| | | | AAAGTAGCGC | | | | | |
| 413219 | 661 | 680 | GAAAGTAGTC | 5-10-5 | 0 | 31593 | 31612 | 209 |
| | | | TCGAAAGTAG | | | | | |
| 413220 | 665 | 684 | ATGGGAAAGT | 5-10-5 | 0 | 31597 | 31616 | 210 |
| | | | AGTCTCGAAA | | | | | |
| 366728 | 757 | 776 | TGCAGAAGGC | 5-10-5 | 46 | 37285 | 37304 | 149 |
| | | | ACCCAGGCCC | | | | | |
| 413221 | 780 | 799 | TTCTGTGGCC | 5-10-5 | 25 | 37308 | 37327 | 211 |
| | | | TCTGTGCTGA | | | | | |
| 413222 | 783 | 802 | CACTTCTGTG | 5-10-5 | 38 | 37311 | 37330 | 212 |
| | | | GCCTCTGTGC | | | | | |
| 413223 | 786 | 805 | GCTCACTTCT | 5-10-5 | 41 | 37314 | 37333 | 213 |
| | | | GTGGCCTCTG | | | | | |
| 413224 | 789 | 808 | CTTGCTCACT | 5-10-5 | 48 | 37317 | 37336 | 214 |
| | | | TCTGTGGCCT | | | | | |
| 413225 | 792 | 811 | CTTCTTGCTC | 5-10-5 | 25 | 37320 | 37339 | 215 |
| | | | ACTTCTGTGG | | | | | |
| 413226 | 798 | 817 | TGGGAACTTC | 5-10-5 | 43 | 37326 | 37345 | 216 |
| | | | TTGCTCACTT | | | | | |
| 413227 | 801 | 820 | GCCTGGGAAC | 5-10-5 | 47 | 37329 | 37348 | 217 |
| | | | TTCTTGCTCA | | | | | |
| 413228 | 804 | 823 | TATGCCTGGG | 5-10-5 | 26 | 37332 | 37351 | 218 |
| | | | AACTTCTTGC | | | | | |
| 413229 | 808 | 827 | GCCGTATGCC | 5-10-5 | 29 | 37336 | 37355 | 219 |
| | | | TGGGAACTTC | | | | | |
| 413230 | 811 | 830 | AAGGCCGTAT | 5-10-5 | 25 | 37339 | 37358 | 220 |
| | | | GCCTGGGAAC | | | | | |
| 413231 | 814 | 833 | GGTAAGGCCG | 5-10-5 | 41 | 37342 | 37361 | 221 |
| | | | TATGCCTGGG | | | | | |
| 217328 | 938 | 957 | GCATTGCCAC | 5-10-5 | 41 | 38091 | 38110 | 144 |
| | | | TCCCATTCTT | | | | | |
| 366730 | 979 | 998 | AGCTCAGAGA | 5-10-5 | 39 | 38132 | 38151 | 150 |
| | | | CTCAGCCGCA | | | | | |
| 370747 | 982 | 1001 | TGGAGCTCAG | 2-16-2 | 37 | 38135 | 38154 | 153 |
| | | | AGACTCAGCC | | | | | |
| 366746 | 1366 | 1385 | TGGTCTTGTG | 5-10-5 | 41 | 41337 | 41356 | 151 |
| | | | CTTGTCGAAG | | | | | |
| 370784 | 2128 | 2147 | GCTGCATCCA | 2-16-2 | 53 | 42099 | 42118 | 154 |
| | | | TGTCATCAGC | | | | | |

TABLE 4
Inhibition of DGAT2 mRNA by 5-10-5 MOE
gapmers targeting SEQ ID NO: 1 and 2

| | SEQ | SEQ | | | SEQ | SEQ | |
|---|---|---|---|---|---|---|---|
| | ID | ID | | % | ID | ID | |
| | NO: | NO: | | in | NO: | NO: | |
| | 1 | 1 | | hi | 2 | 2 | SEQ |
| ISIS | Start | Stop | | bi | Start | Stop | ID |
| NO | Site | Site | Sequence | tion | Site | Site | NO |
| 413232 | 817 | 836 | CCAGGTAAGG | 78 | 37345 | 37364 | 225 |
| | | | CCGTATGCCT | | | | |
| 413233 | 820 | 839 | TAGCCAGGTA | 56 | 37348 | 37367 | 226 |
| | | | AGGCCGTATG | | | | |
| 413234 | 823 | 842 | GTGTAGCCAG | 50 | 37351 | 37370 | 227 |
| | | | GTAAGGCCGT | | | | |
| 413235 | 827 | 846 | GCCAGTGTAG | 9 | 37355 | 37374 | 228 |
| | | | CCAGGTAAGG | | | | |
| 413236 | 861 | 880 | GTACTCCCTC | 72 | 37389 | 37408 | 229 |
| | | | AACACAGGCA | | | | |
| 413237 | 864 | 883 | CAGGTACTCC | 52 | 37392 | 37411 | 230 |
| | | | CTCAACACAG | | | | |
| 413238 | 867 | 886 | CATCAGGTAC | 35 | 37395 | 37414 | 231 |
| | | | TCCCTCAACA | | | | |
| 413239 | 870 | 889 | AGACATCAGG | 35 | 37398 | 37417 | 232 |
| | | | TACTCCCTCA | | | | |
| 413240 | 878 | 897 | ATACCTCCAG | 50 | n/a | n/a | 233 |
| | | | ACATCAGGTA | | | | |
| 413241 | 881 | 900 | CAGATACCTC | 38 | n/a | n/a | 234 |
| | | | CAGACATCAG | | | | |
| 413242 | 887 | 906 | ACAGGGCAGA | 58 | n/a | n/a | 235 |
| | | | TACCTCCAGA | | | | |
| 413243 | 910 | 929 | AATAGTCTAT | 63 | 38063 | 38082 | 236 |
| | | | GGTGTCCCGG | | | | |
| 413244 | 913 | 932 | GCAAATAGTC | 60 | 38066 | 38085 | 237 |
| | | | TATGGTGTCC | | | | |
| 413245 | 916 | 935 | AAAGCAAATA | 46 | 38069 | 38088 | 238 |
| | | | GTCTATGGTG | | | | |
| 413246 | 919 | 938 | TTGAAAGCAA | 42 | 38072 | 38091 | 239 |
| | | | ATAGTCTATG | | | | |
| 413247 | 922 | 941 | TCTTTGAAAG | 40 | 38075 | 38094 | 240 |
| | | | CAAATAGTCT | | | | |
| 413248 | 925 | 944 | CATTCTTTGA | 15 | 38078 | 38097 | 241 |
| | | | AAGCAAATAG | | | | |
| 413249 | 928 | 947 | TCCCATTCTT | 31 | 38081 | 38100 | 242 |
| | | | TGAAAGCAAA | | | | |
| 413250 | 932 | 951 | CCACTCCCAT | 34 | 38085 | 38104 | 243 |
| | | | TCTTTGAAAG | | | | |
| 413251 | 935 | 954 | TTGCCACTCC | 39 | 38088 | 38107 | 244 |
| | | | CATTCTTTGA | | | | |
| 217328 | 938 | 957 | GCATTGCCAC | 70 | 38091 | 38110 | 144 |
| | | | TCCCATTCTT | | | | |
| 413252 | 976 | 995 | TCAGAGACTC | 43 | 38129 | 38148 | 245 |
| | | | AGCCGCACCC | | | | |
| 413253 | 987 | 1006 | AGGCATGGAG | 69 | 38140 | 38159 | 246 |
| | | | CTCAGAGACT | | | | |
| 413254 | 1002 | 1021 | GACTGCATTC | 60 | 38155 | 38174 | 247 |
| | | | TTGCCAGGCA | | | | |
| 413255 | 1005 | 1024 | GGTGACTGCA | 25 | 38158 | 38177 | 248 |
| | | | TTCTTGCCAG | | | | |
| 413256 | 1012 | 1031 | TCCGCAGGGT | 48 | 38165 | 38184 | 249 |
| | | | GACTGCATTC | | | | |
| 369241 | 1019 | 1038 | TTGCGGTTCC | 70 | 38172 | 38191 | 222 |
| | | | GCAGGGTGAC | | | | |
| 413257 | 1022 | 1041 | CCCTTGCGGT | 36 | 38175 | 38194 | 250 |
| | | | TCCGCAGGGT | | | | |
| 413258 | 1025 | 1044 | AAGCCCTTGC | 67 | 38178 | 38197 | 251 |
| | | | GGTTCCGCAG | | | | |
| 413259 | 1028 | 1047 | ACAAAGCCCT | 35 | 38181 | 38200 | 252 |
| | | | TGCGGTTCCG | | | | |
| 413260 | 1034 | 1053 | AGTTTCACAA | 25 | 38187 | 38206 | 253 |
| | | | AGCCCTTGCG | | | | |
| 413261 | 1037 | 1056 | GCCAGTTTCA | 34 | 38190 | 38209 | 254 |
| | | | CAAAGCCCTT | | | | |
| 413262 | 1040 | 1059 | AGGGCCAGTT | 33 | 38193 | 38212 | 255 |
| | | | TCACAAAGCC | | | | |
| 413263 | 1043 | 1062 | CGCAGGGCCA | 31 | 38196 | 38215 | 256 |
| | | | GTTTCACAAA | | | | |
| 413264 | 1088 | 1107 | TCATTCTCTC | 18 | 39135 | 39154 | 257 |
| | | | CAAAGGAGTA | | | | |
| 413265 | 1091 | 1110 | ACTTCATTCT | 45 | 39138 | 39157 | 258 |
| | | | CTCCAAAGGA | | | | |
| 413266 | 1095 | 1114 | GTACACTTCA | 82 | 39142 | 39161 | 259 |
| | | | TTCTCTCCAA | | | | |
| 413267 | 1101 | 1120 | CTGCTTGTAC | 58 | 39148 | 39167 | 260 |
| | | | ACTTCATTCT | | | | |
| 413268 | 1105 | 1124 | TCACCTGCTT | 40 | 39152 | 39171 | 261 |
| | | | GTACACTTCA | | | | |
| 413269 | 1111 | 1130 | CGAAGATCAC | 63 | 39158 | 39177 | 262 |
| | | | CTGCTTGTAC | | | | |
| 413270 | 1114 | 1133 | CCTCGAAGAT | 53 | 39161 | 39180 | 263 |
| | | | CACCTGCTTG | | | | |
| 413271 | 1117 | 1136 | CCTCCTCGAA | 49 | 39164 | 39183 | 264 |
| | | | GATCACCTGC | | | | |
| 413272 | 1120 | 1139 | AGCCCTCCTC | 39 | 39167 | 39186 | 265 |
| | | | GAAGATCACC | | | | |
| 413273 | 1123 | 1142 | AGGAGCCCTC | 31 | 39170 | 39189 | 266 |
| | | | CTCGAAGATC | | | | |
| 413274 | 1126 | 1145 | CCCAGGAGCC | 54 | 39173 | 39192 | 267 |
| | | | CTCCTCGAAG | | | | |
| 413275 | 1129 | 1148 | GGCCCCAGGA | 40 | 39176 | 39195 | 268 |
| | | | GCCCTCCTCG | | | | |
| 411877 | 1136 | 1155 | ACCCATCGGC | 59 | 39183 | 39202 | 223 |
| | | | CCCAGGAGCC | | | | |
| 413276 | 1157 | 1176 | TATTTCTGGA | 22 | 39204 | 39223 | 269 |
| | | | ACTTCTTCTG | | | | |
| 413277 | 1160 | 1179 | ATGTATTTCT | 45 | 39207 | 39226 | 270 |
| | | | GGAACTTCTT | | | | |
| 413278 | 1171 | 1190 | GGGCGAAACC | 24 | 39218 | 39237 | 271 |
| | | | AATGTATTTC | | | | |
| 413279 | 1208 | 1227 | TCGGAGGAGA | 60 | 39255 | 39274 | 272 |
| | | | AGAGGCCTCG | | | | |
| 413280 | 1211 | 1230 | GTGTCGGAGG | 52 | 39258 | 39277 | 273 |
| | | | AGAAGAGGCC | | | | |
| 413281 | 1215 | 1234 | CCAGGTGTCG | 53 | 39262 | 39281 | 274 |
| | | | GAGGAGAAGA | | | | |
| 413282 | 1222 | 1241 | CCAGCCCCCA | 50 | 39269 | 39288 | 275 |
| | | | GGTGTCGGAG | | | | |
| 413283 | 1250 | 1269 | ACAGTGGTGA | 52 | 39297 | 39316 | 276 |
| | | | TGGGCTTGGA | | | | |
| 413284 | 1273 | 1292 | GGATGGTGAT | 67 | 41244 | 41263 | 277 |
| | | | GGGCTCTCCC | | | | |
| 411879 | 1330 | 1349 | CCATGTACAT | 52 | 41301 | 41320 | 224 |
| | | | GGTGTGGTAC | | | | |
| 413285 | 1334 | 1353 | GCCTCCATGT | 63 | 41305 | 41324 | 278 |
| | | | ACATGGTGTG | | | | |
| 413286 | 1363 | 1382 | TCTTGTGCTT | 62 | 41334 | 41353 | 279 |
| | | | GTCGAAGAGC | | | | |
| 413287 | 1399 | 1418 | CCTCCAGGAC | 66 | 41370 | 41389 | 280 |
| | | | CTCAGTCTCC | | | | |
| 413288 | 1403 | 1422 | TTCACCTCCA | 46 | 41374 | 41393 | 281 |
| | | | GGACCTCAGT | | | | |
| 413289 | 1407 | 1426 | TCAGTTCACC | 46 | 41378 | 41397 | 282 |
| | | | TCCAGGACCT | | | | |
| 413290 | 1412 | 1431 | CTGGCTCAGT | 90 | 41383 | 41402 | 283 |
| | | | TCACCTCCAG | | | | |
| 413291 | 1537 | 1556 | TGTAATGGTT | 26 | 41508 | 41527 | 284 |
| | | | TAGCAAAATT | | | | |
| 413292 | 1555 | 1574 | TTAAAAAAGA | 0 | 41526 | 41545 | 285 |
| | | | CCTAACATTG | | | | |
| 413293 | 1559 | 1578 | CTTCTTAAAA | 26 | 41530 | 41549 | 286 |
| | | | AAGACCTAAC | | | | |
| 413294 | 1563 | 1582 | TTTCCTTCTT | 9 | 41534 | 41553 | 287 |
| | | | AAAAAAGACC | | | | |
| 413295 | 1567 | 1586 | ACTTTTTCCT | 0 | 41538 | 41557 | 288 |
| | | | TCTTAAAAAA | | | | |
| 413296 | 1572 | 1591 | TACTGACTTT | 39 | 41543 | 41562 | 289 |
| | | | TTCCTTCTTA | | | | |
| 413297 | 1616 | 1635 | CCACCACCTA | 55 | 41587 | 41606 | 290 |
| | | | GAACAGGGCA | | | | |
| 413298 | 1653 | 1672 | AGGTTAGCTG | 59 | 41624 | 41643 | 291 |
| | | | AGCCACCCAG | | | | |
| 413299 | 1840 | 1859 | GTCCTGCAGT | 54 | 41811 | 41830 | 292 |
| | | | TTCAGGACTA | | | | |
| 413300 | 1844 | 1863 | ACTGGTCCTG | 55 | 41815 | 41834 | 293 |
| | | | CAGTTTCAGG | | | | |
| 413301 | 1860 | 1879 | TCCCCTTGGC | 47 | 41831 | 41850 | 294 |
| | | | AGAGAAACTG | | | | |
| 413302 | 1864 | 1883 | CTCCTCCCCT | 43 | 41835 | 41854 | 295 |
| | | | TGGCAGAGAA | | | | |
| 413303 | 1868 | 1887 | CCAACTCCTC | 28 | 41839 | 41858 | 296 |
| | | | CCCTTGGCAG | | | | |
| 413304 | 1872 | 1891 | CTCTCCAACT | 25 | 41843 | 41862 | 297 |
| | | | CCTCCCCTTG | | | | |
| 413305 | 1875 | 1894 | GTGCTCTCCA | 34 | 41846 | 41865 | 298 |
| | | | ACTCCTCCCC | | | | |

TABLE 5
Inhibition of DGAT2 mRNA by 5-10-5 MOE
gapmers targeting SEQ ID NO: 1 and 2

| | SEQ | SEQ | | | SEQ | SEQ | |
|---|---|---|---|---|---|---|---|
| | ID | ID | | % | ID | ID | |
| | NO: | NO: | | in- | NO: | NO: | |
| | 1 | 1 | | hi- | 2 | 2 | SEQ |
| ISIS | Start | Stop | | bi- | Start | Stop | ID |
| NO | Site | Site | Sequence | tion | Site | Site | NO |
| 413347 | n/a | n/a | AGCCTGCCAC | 37 | 10050 | 10069 | 339 |
| | | | AGGGCCCTTT | | | | |
| 413348 | n/a | n/a | AGGACAGGGC | 44 | 10396 | 10415 | 340 |
| | | | AGACACACCT | | | | |
| 413349 | n/a | n/a | GATTTGTACT | 34 | 10703 | 10722 | 341 |
| | | | TGAATCCAGG | | | | |
| 413350 | n/a | n/a | ACACGCAGAC | 46 | 10747 | 10766 | 342 |
| | | | CAGGACAGCT | | | | |
| 413351 | n/a | n/a | TTTGGATAGT | 41 | 10943 | 10962 | 343 |
| | | | CGATTTACCA | | | | |
| 413352 | n/a | n/a | AAGATTCATA | 6 | 11045 | 11064 | 344 |
| | | | ACTATATCTA | | | | |
| 413353 | n/a | n/a | AAAAACATGA | 31 | 11558 | 11577 | 345 |
| | | | CAGCCAGGGT | | | | |
| 413354 | n/a | n/a | GACTTCCCTT | 5 | 11983 | 12002 | 346 |
| | | | CACAGAATCC | | | | |
| 413355 | n/a | n/a | CAGGCAGGTG | 21 | 12250 | 12269 | 347 |
| | | | TCAGAGGGCT | | | | |
| 413356 | n/a | n/a | TAGCCTGGCT | 42 | 12892 | 12911 | 348 |
| | | | TTGATAACCC | | | | |
| 413357 | n/a | n/a | CATAGGCCAG | 35 | 13206 | 13225 | 349 |
| | | | GAGGAAGAGT | | | | |
| 413358 | n/a | n/a | TTGCTTAAAC | 17 | 13541 | 13560 | 350 |
| | | | AGATAAGCAC | | | | |
| 413359 | n/a | n/a | AATGTCACAA | 4 | 14428 | 14447 | 351 |
| | | | GTTCACAAAC | | | | |
| 413360 | n/a | n/a | CTGACCTCAG | 31 | 14721 | 14740 | 352 |
| | | | GGTGATCAAG | | | | |
| 413361 | n/a | n/a | CCAAGCAGGA | 19 | 15143 | 15162 | 353 |
| | | | GCTGGACAGA | | | | |
| 413362 | n/a | n/a | TCATTTCATA | 34 | 15215 | 15234 | 354 |
| | | | GATGAGGAGA | | | | |
| 413363 | n/a | n/a | AGGAGTTTGT | 39 | 15320 | 15339 | 355 |
| | | | GTTTCCCATT | | | | |
| 413364 | n/a | n/a | GGCAGGGCTT | 48 | 15359 | 15378 | 356 |
| | | | AGAATGGCTA | | | | |
| 413365 | n/a | n/a | ACCATTTTCA | 30 | 15572 | 15591 | 357 |
| | | | CAAGGAGAAG | | | | |
| 413366 | n/a | n/a | TTCAAAAAGT | 47 | 15738 | 15757 | 358 |
| | | | AGCTACTGCA | | | | |
| 413367 | n/a | n/a | TCCAGGACCC | 50 | 15813 | 15832 | 359 |
| | | | TGGACATGAT | | | | |
| 413368 | n/a | n/a | AGAGCCAGCA | 20 | 16251 | 16270 | 360 |
| | | | CACAGCTATG | | | | |
| 413369 | n/a | n/a | AGTCTAGTTG | 16 | 16545 | 16564 | 361 |
| | | | GAAAAGTAGA | | | | |
| 413370 | n/a | n/a | AGATGCCACT | 24 | 17722 | 17741 | 362 |
| | | | TCATCAAGGC | | | | |
| 413371 | n/a | n/a | GAAGTCAGGC | 26 | 17744 | 17763 | 363 |
| | | | CAAGTGCCAA | | | | |
| 413372 | n/a | n/a | TGATTCTTAC | 22 | 18221 | 18240 | 364 |
| | | | CTGCAATGAG | | | | |
| 413373 | n/a | n/a | CCAAGTAAGC | 32 | 18329 | 18348 | 365 |
| | | | CTCGGTGTCC | | | | |
| 413374 | n/a | n/a | TGAGTAGTCA | 30 | 19019 | 19038 | 366 |
| | | | AAGGTGGCTT | | | | |
| 413375 | n/a | n/a | ATGCCTGAGG | 45 | 19907 | 19926 | 367 |
| | | | GCAGCAGTGT | | | | |
| 413376 | n/a | n/a | TGACCAGGAA | 15 | 19967 | 19986 | 368 |
| | | | GGCCACACCT | | | | |
| 413377 | n/a | n/a | GGCTTCACCG | 39 | 20409 | 20428 | 369 |
| | | | TCCCACAGCA | | | | |
| 413378 | n/a | n/a | CAGGACTTGG | 35 | 20883 | 20902 | 370 |
| | | | TACCTGATTC | | | | |
| 413379 | n/a | n/a | TGGCTGGGAG | 10 | 21131 | 21150 | 371 |
| | | | GAGTCCAGCA | | | | |
| 413380 | n/a | n/a | GGGTCAAGGT | 33 | 21660 | 21679 | 372 |
| | | | CACTCAGCCA | | | | |
| 413381 | n/a | n/a | TATTTGAAGA | 0 | 22021 | 22040 | 373 |
| | | | TAAAGTCAGA | | | | |
| 413382 | n/a | n/a | GGGATGATAA | 37 | 22093 | 22112 | 374 |
| | | | ACACTAAGGT | | | | |
| 217328 | 938 | 957 | GCATTGCCAC | 59 | 38091 | 38110 | 144 |
| | | | TCCCATTCTT | | | | |
| 413306 | 1992 | 2011 | CTGGAGGCCA | 23 | 41963 | 41982 | 299 |
| | | | GTCCAGGCTC | | | | |
| 413307 | 1995 | 2014 | ATCCTGGAGG | 18 | 41966 | 41985 | 300 |
| | | | CCAGTCCAGG | | | | |
| 413308 | 2006 | 2025 | CCCCCATCCT | 7 | 41977 | 41996 | 301 |
| | | | CATCCTGGAG | | | | |
| 413309 | 2010 | 2029 | GCCACCCCCA | 0 | 41981 | 42000 | 302 |
| | | | TCCTCATCCT | | | | |
| 413310 | 2014 | 2033 | CATTGCCACC | 9 | 41985 | 42004 | 303 |
| | | | CCCATCCTCA | | | | |
| 413311 | 2040 | 2059 | GGGCAGTCCT | 37 | 42011 | 42030 | 304 |
| | | | TTCCCCTGCA | | | | |
| 413312 | 2081 | 2100 | TAGCTCATGG | 35 | 42052 | 42071 | 305 |
| | | | TGGCGGCATC | | | | |
| 413313 | 2087 | 2106 | TCCACCTAGC | 21 | 42058 | 42077 | 306 |
| | | | TCATGGTGGC | | | | |
| 413314 | 2091 | 2110 | TTACTCCACC | 6 | 42062 | 42081 | 307 |
| | | | TAGCTCATGG | | | | |
| 413315 | 2099 | 2118 | AAAACCAGTT | 0 | 42070 | 42089 | 308 |
| | | | ACTCCACCTA | | | | |
| 413316 | 2102 | 2121 | AGAAAAACCA | 4 | 42073 | 42092 | 309 |
| | | | GTTACTCCAC | | | | |
| 413317 | 2113 | 2132 | TCAGCCACCC | 0 | 42084 | 42103 | 310 |
| | | | AAGAAAAACC | | | | |
| 413318 | 2120 | 2139 | CATGTCATCA | 16 | 42091 | 42110 | 311 |
| | | | GCCACCCAAG | | | | |
| 413319 | 2128 | 2147 | GCTGCATCCA | 43 | 42099 | 42118 | 154 |
| | | | TGTCATCAGC | | | | |
| 413320 | 2131 | 2150 | TGTGCTGCAT | 36 | 42102 | 42121 | 312 |
| | | | CCATGTCATC | | | | |
| 413321 | 2136 | 2155 | GAGTCTGTGC | 48 | 42107 | 42126 | 313 |
| | | | TGCATCCATG | | | | |
| 413322 | 2143 | 2162 | CAAGGCTGAG | 24 | 42114 | 42133 | 314 |
| | | | TCTGTGCTGC | | | | |
| 413323 | 2146 | 2165 | GGCCAAGGCT | 17 | 42117 | 42136 | 315 |
| | | | GAGTCTGTGC | | | | |
| 413324 | 2149 | 2168 | CCAGGCCAAG | 27 | 42120 | 42139 | 316 |
| | | | GCTGAGTCTG | | | | |
| 413325 | 2182 | 2201 | AAGGTAAACT | 37 | 42153 | 42172 | 317 |
| | | | GAGGCCACCA | | | | |
| 413326 | 2185 | 2204 | GGGAAGGTAA | 32 | 42156 | 42175 | 318 |
| | | | ACTGAGGCCA | | | | |
| 413327 | 2236 | 2255 | AGGCCCCTTC | 43 | 42207 | 42226 | 319 |
| | | | TGAAGAGGGA | | | | |
| 413328 | 2239 | 2258 | GCCAGGCCCC | 36 | 42210 | 42229 | 320 |
| | | | TTCTGAAGAG | | | | |
| 413329 | 2242 | 2261 | AAGGCCAGGC | 32 | 42213 | 42232 | 321 |
| | | | CCCTTCTGAA | | | | |
| 413330 | 2246 | 2265 | TCAGAAGGCC | 20 | 42217 | 42236 | 322 |
| | | | AGGCCCCTTC | | | | |
| 413331 | 2252 | 2271 | TGCTGCTCAG | 42 | 42223 | 42242 | 323 |
| | | | AAGGCCAGGC | | | | |
| 413332 | 2257 | 2276 | TAATCTGCTG | 36 | 42228 | 42247 | 324 |
| | | | CTCAGAAGGC | | | | |
| 413333 | 2265 | 2284 | TTTGGAACTA | 50 | 42236 | 42255 | 325 |
| | | | ATCTGCTGCT | | | | |
| 413334 | 2274 | 2293 | GCCACCTGCT | 41 | 42245 | 42264 | 326 |
| | | | TTGGAACTAA | | | | |
| 413335 | 2301 | 2320 | ACAGAAAAGT | 40 | 42272 | 42291 | 327 |
| | | | GAGGCTTGGG | | | | |
| 413336 | 2304 | 2323 | GGCACAGAAA | 32 | 42275 | 42294 | 328 |
| | | | AGTGAGGCTT | | | | |
| 413337 | 2307 | 2326 | GAAGGCACAG | 11 | 42278 | 42297 | 329 |
| | | | AAAAGTGAGG | | | | |
| 413338 | 2310 | 2329 | CAGGAAGGCA | 28 | 42281 | 42300 | 330 |
| | | | CAGAAAAGTG | | | | |
| 413339 | 2313 | 2332 | CCTCAGGAAG | 40 | 42284 | 42303 | 331 |
| | | | GCACAGAAAA | | | | |
| 413340 | 2317 | 2336 | ACCCCCTCAG | 25 | 42288 | 42307 | 332 |
| | | | GAAGGCACAG | | | | |
| 413341 | 2323 | 2342 | GGCCCAACCC | 19 | 42294 | 42313 | 333 |
| | | | CCTCAGGAAG | | | | |
| 413342 | 2373 | 2392 | TCTCATCAAG | 6 | 42344 | 42363 | 334 |
| | | | AGATAACAGA | | | | |
| 413343 | 2376 | 2395 | TGATCTCATC | 17 | 42347 | 42366 | 335 |
| | | | AAGAGATAAC | | | | |
| 413344 | 2399 | 2418 | TACAAAAGTC | 40 | 42370 | 42389 | 336 |
| | | | TGACATGGTG | | | | |
| 413345 | 2402 | 2421 | ATATACAAAA | 21 | 42373 | 42392 | 337 |
| | | | GTCTGACATG | | | | |
| 413346 | 2406 | 2425 | AGGCATATAC | 38 | 42377 | 42396 | 338 |
| | | | AAAAGTCTGA | | | | |

TABLE 6
Inhibition of DGAT2 mRNA by 5-10-5 MOE
gapmers targeting SEQ ID NO: 1 and 2

| | SEQ | SEQ | | | |
|---|---|---|---|---|---|
| | ID | ID | | | |
| | NO: | NO: | | | |
| | 2 | 2 | | % | SEQ |
| ISIS | Start | Stop | | inhi- | ID |
| NO | Site | Site | Sequence | bition | NO |
| 413383 | 22161 | 22180 | ACCCAGAGATGGTGATAAGG | 53 | 375 |
| 413384 | 22521 | 22540 | AAGTGAACCCTCACTTCCCA | 35 | 376 |
| 413385 | 22840 | 22859 | ACATATCCCCAACTGAAACA | 21 | 377 |
| 413386 | 22849 | 22868 | TCACTGATGACATATCCCCA | 52 | 378 |
| 413387 | 22862 | 22881 | GAGTATAGAAATTTCACTGA | 44 | 379 |
| 413388 | 22877 | 22896 | TGCAGCTTGGAGGAGGAGTA | 36 | 380 |
| 413389 | 23153 | 23172 | GCATTTTAACAAGATCCCCA | 34 | 381 |
| 413390 | 23167 | 23186 | CTGAATCAAAATCTGCATTT | 28 | 382 |
| 413391 | 23182 | 23201 | TCCAGACTGGATTTACTGAA | 60 | 383 |
| 413392 | 23550 | 23569 | TTATCCTTGAGGGTCTCATA | 45 | 384 |
| 413393 | 23560 | 23579 | CATCACATGCTTATCCTTGA | 41 | 385 |
| 413394 | 23669 | 23688 | TTCCCCAGAGCAGCTCTGAG | 27 | 386 |
| 413395 | 23726 | 23745 | GCGGCAGAGCCAGGACTGAA | 35 | 387 |
| 413396 | 23812 | 23831 | GTCATCCAGTATAGCCTAAT | 44 | 388 |
| 413397 | 23956 | 23975 | TAAAGAGGCTGGGCCATAGA | 21 | 389 |
| 413398 | 24122 | 24141 | TCAAACCTAGGTTCAGACTT | 47 | 390 |
| 413399 | 24204 | 24223 | AGGAAGGAAATGCTAGGCCT | 64 | 391 |
| 413400 | 24642 | 24661 | ACAGGAAGCCTGGTGACTGC | 54 | 392 |
| 413401 | 24790 | 24809 | CAGGCAGCCTGAAGGACACT | 49 | 393 |
| 413402 | 25074 | 25093 | AGGACAGAGGTTCAACATCC | 53 | 394 |
| 413403 | 25234 | 25253 | AGACCACATGAAGTATCTAA | 50 | 395 |
| 413404 | 25376 | 25395 | GCTATAGAATCAGACAGACC | 46 | 396 |
| 413405 | 25488 | 25507 | CCTACAGCAGAGGGAAGATG | 13 | 397 |
| 413406 | 25493 | 25512 | CAGTGCCTACAGCAGAGGGA | 0 | 398 |
| 413407 | 25504 | 25523 | GATGCTGGATCCAGTGCCTA | 53 | 399 |
| 413408 | 25953 | 25972 | GTGGGAAAGGCACAGGCTTT | 53 | 400 |
| 413409 | 26393 | 26412 | GATGGCAACCTAAGGAGTGA | 37 | 401 |
| 413410 | 26893 | 26912 | GTTCTTGGGCCTAAAGGTGA | 34 | 402 |
| 413411 | 27564 | 27583 | ATTAGCAGTAGCTCAGGAGA | 48 | 403 |
| 413412 | 27677 | 27696 | CTGGTCCAGGGAGAGACCAA | 25 | 404 |
| 413413 | 27711 | 27730 | AGAGGGTTCCATGGCACAAA | 67 | 405 |
| 413414 | 28186 | 28205 | AATTTCCTTACAGGGTATTG | 46 | 406 |
| 413415 | 28461 | 28480 | TCATGAGAAGCTTAGAAGGC | 58 | 407 |
| 413416 | 28524 | 28543 | CAACAGGCTCTGGTTCCATG | 56 | 408 |
| 413417 | 28920 | 28939 | CAGGCCCCACTGCTTAGAGG | 48 | 409 |
| 413418 | 29446 | 29465 | AAATGGTAGCCCCTTGTTGC | 32 | 410 |
| 413419 | 29503 | 29522 | TTTCCCATGGGAGAAGATAA | 55 | 411 |
| 413420 | 30361 | 30380 | AGCGCAGAGCCCATCAGCCT | 48 | 412 |
| 413421 | 30620 | 30639 | CAGGGTGACTTTGCCCCATT | 43 | 413 |
| 413422 | 30974 | 30993 | TGGCACTAAGCTAGGCACAC | 62 | 414 |
| 413423 | 31184 | 31203 | AGGGAGGCCTTGCACTTACC | 13 | 415 |
| 413424 | 31240 | 31259 | TGAGGCCCTTCAGCTTGTGC | 49 | 416 |
| 413425 | 31370 | 31389 | AAACCCTCGACTGAGTGTGA | 37 | 417 |
| 413426 | 31531 | 31550 | CCTTCCAGGGAATAAAATAC | 3 | 418 |
| 413427 | 31534 | 31553 | CCACCTTCCAGGGAATAAAA | 22 | 419 |
| 413428 | 31537 | 31556 | CTGCCACCTTCCAGGGAATA | 27 | 420 |
| 413429 | 31620 | 31639 | AACACTCACAGCACTTTACC | 4 | 421 |
| 413430 | 31769 | 31788 | TGGATACTCAGAAGAGCAGT | 37 | 422 |
| 413431 | 31935 | 31954 | CAGAGTTATCCTCAATTCAC | 34 | 423 |
| 413432 | 32145 | 32164 | ACACCAGGATCTCAGTCACT | 42 | 424 |
| 413433 | 32431 | 32450 | GCCTGGACAAGTCCTGCCCA | 70 | 425 |
| 413434 | 32528 | 32547 | GAAACAGGCAGTAGGAAATC | 23 | 426 |
| 413435 | 32644 | 32663 | ATGGAGTGACAGGGCAGGAA | 59 | 427 |
| 413436 | 32939 | 32958 | AGGCCACAGTGGCAACAGAG | 54 | 428 |
| 413437 | 33067 | 33086 | GTTCTTTTGGAAGGGTGGAG | 52 | 429 |
| 413438 | 33164 | 33183 | GGAGCCCTCACAGGGCCAGG | 38 | 430 |
| 413439 | 33364 | 33383 | GGACAGGAGGGTCACACACA | 45 | 431 |
| 413440 | 33671 | 33690 | AGATGGACAGGTGATTCTAA | 50 | 432 |
| 413441 | 33739 | 33758 | TTAAGCTTTGTGACCTTGGG | 67 | 433 |
| 413442 | 34101 | 34120 | GGGAAGGATACCGCCAATGA | 57 | 434 |
| 413443 | 34311 | 34330 | CAGTGGGCCCCAGGTGGCTC | 46 | 435 |
| 413444 | 34642 | 34661 | GGTGGGAAACTTGGAAACTT | 37 | 436 |
| 413445 | 35355 | 35374 | ACAATTCCTGGATAACAAGG | 41 | 437 |
| 413446 | 35362 | 35381 | TAGAAATACAATTCCTGGAT | 71 | 438 |
| 413447 | 35568 | 35587 | TGTCCTTATCAAAATCCCTC | 38 | 439 |
| 413448 | 36267 | 36286 | GCTGAGAGAGACAATGAGTA | 54 | 440 |
| 413449 | 36858 | 36877 | GATTATTCTAAAACTCAAAT | 0 | 441 |
| 413450 | 37202 | 37221 | ACCAGCTGCAAGGATGACCT | 49 | 442 |
| 413451 | 37457 | 37476 | GAGGCTCAGGCCTTGACAAC | 12 | 443 |
| 413452 | 37604 | 37623 | TGTTATCCGAGTTGAATTCT | 45 | 444 |
| 413453 | 37818 | 37837 | GTTTTGGGAACTCATGCATT | 50 | 445 |
| 413454 | 37837 | 37856 | CAGCTAATGATACAAGGTTG | 55 | 446 |
| 413455 | 37880 | 37899 | GCTATTCATTTTTCTGAGCC | 47 | 447 |
| 217328 | 38091 | 38110 | GCATTGCCACTCCCATTCTT | 67 | 144 |
| 413456 | 39033 | 39052 | AGAGGCCCTGGACACTGGCC | 32 | 448 |
| 413457 | 39040 | 39059 | TCAGCCTAGAGGCCCTGGAC | 26 | 449 |
| 413458 | 39300 | 39319 | CCAACAGTGGTGATGGGCTT | 60 | 450 |
| 413459 | 39305 | 39324 | GCTTACCAACAGTGGTGATG | 21 | 451 |

### Example 2: Antisense Inhibition of Human Diacylglycerol Acyltransferase 2 in HepG2 Cells by MOE Gapmers

[0452] Antisense oligonucleotides were designed targeting a diacylglycerol acyltransferase 2 (DGAT2) nucleic acid and were tested for their effects on DGAT2 mRNA in vitro. The antisense oligonucleotides were tested in a series of experiments that had similar culture conditions. The results for each experiment are presented in separate tables shown below. Cultured HepG2 cells at a density of 10,000 cells per well were transfected using Lipofectin reagent with 120 nM antisense oligonucleotide. After a treatment period of approximately 24 hours, RNA was isolated from the cells and DGAT2 mRNA levels were measured by quantitative real-time PCR. Human primer probe set RTS2988_MGB (forward sequence AACTGGCCCTGCGTCATG, designated herein as SEQ ID NO: 7; reverse sequence CTTGTACACTTCATTCTCTCCAAAGG, designated herein as SEQ ID NO: 8; probe sequence CTGACCTGGTTCCC, designated herein as SEQ ID NO: 9) was used to measure mRNA levels. DGAT2 mRNA levels were adjusted according to total RNA content, as measured by RIBOGREEN®. Results are presented as percent inhibition of DGAT2, relative to untreated control cells.

[0453] ISIS oligonucleotides from an earlier published application, WO 2005/019418, were also included in this assay. These ISIS oligonucleotides are ISIS 217316, ISIS 217317, ISIS 217328, ISIS 217329, ISIS 334177, ISIS 334178, ISIS 366730, ISIS 366731, and ISIS 369255. As shown in the Tables below, several newly designed antisense oligonucleotides demonstrated similar or greater potency that any of these benchmark oligonucleotides.

[0454] The newly designed chimeric antisense oligonucleotides in the Tables below were designed as 5-10-5 MOE, 3-14-3 MOE, or 2-13-5 MOE gapmers. The 5-10-5 MOE gapmers are 20 nucleosides in length, wherein the central gap segment comprises of ten 2′-deoxynucleosides and is flanked by wing segments on the 5′ direction and the 3′ direction comprising five nucleosides each. The 3-14-3 MOE gapmers are 20 nucleosides in length, wherein the central gap segment comprises of fourteen 2′-deoxynucleosides and is flanked by wing segments on the 5′ direction and the 3′ direction comprising three nucleosides each. The 2-13-5 MOE gapmers are 20 nucleosides in length, wherein the central gap segment comprises of thirteen 2′-deoxynucleosides and is flanked by wing segments on the 5′ direction and the 3′ direction comprising two and three nucleosides respectively. Each nucleoside in the 5′ wing segment and each nucleoside in the 3′ wing segment has a 2′-MOE modification. The internucleoside linkages throughout each gapmer are phosphorothioate (P═S) linkages. All cytosine residues throughout each gapmer are 5-methylcytosines. “Start site” indicates the 5′-most nucleoside to which the gapmer is targeted in the human gene sequence. “Stop site” indicates the 3′-most nucleoside to which the gapmer is targeted in the human gene sequence. Each gapmer listed in the Tables below is targeted to either the human DGAT2 mRNA, designated herein as SEQ ID NO: 1 (Ref Seq No. NM_032564.3) or the human DGAT2 genomic sequence, designated herein as SEQ ID NO: 2 (Ref Seq No. NT_033927.5 truncated from nucleotides 5669186 to 5712008). ‘n/a’ indicates that the antisense oligonucleotide does not target that particular gene sequence with 100% complementarity.

TABLE 8
Inhibition of DGAT2 mRNA by MOE
gapmers targeting SEQ ID NO: 1 and 2

| | SEQ | SEQ | | | | SEQ | SEQ | |
|---|---|---|---|---|---|---|---|---|
| | ID | ID | | | % | ID | ID | |
| | NO: | NO: | | | in- | NO: | NO: | |
| | 1 | 1 | | | hi- | 2 | 2 | SEQ |
| ISIS | Start | Stop | | | bi- | Start | Stop | ID |
| NO | Site | Site | Motif | Sequence | tion | Site | Site | NO |
| 423460 | n/a | n/a | 5-10-5 | TGGACAAGTC | 72 | 32428 | 32447 | 464 |
| | | | | CTGCCCATCT | | | | |
| 423520 | n/a | n/a | 3-14-3 | TGGACAAGTC | 69 | 32428 | 32447 | 464 |
| | | | | CTGCCCATCT | | | | |
| 423598 | n/a | n/a | 2-13-5 | TGGACAAGTC | 51 | 32428 | 32447 | 464 |
| | | | | CTGCCCATCT | | | | |
| 423461 | n/a | n/a | 5-10-5 | CTGGACAAGT | 77 | 32429 | 32448 | 465 |
| | | | | CCTGCCCATC | | | | |
| 423521 | n/a | n/a | 3-14-3 | CTGGACAAGT | 67 | 32429 | 32448 | 465 |
| | | | | CCTGCCCATC | | | | |
| 423599 | n/a | n/a | 2-13-5 | CTGGACAAGT | 58 | 32429 | 32448 | 465 |
| | | | | CCTGCCCATC | | | | |
| 423462 | n/a | n/a | 5-10-5 | CCTGGACAAG | 73 | 32430 | 32449 | 466 |
| | | | | TCCTGCCCAT | | | | |
| 423522 | n/a | n/a | 3-14-3 | CCTGGACAAG | 70 | 32430 | 32449 | 466 |
| | | | | TCCTGCCCAT | | | | |
| 423600 | n/a | n/a | 2-13-5 | CCTGGACAAG | 59 | 32430 | 32449 | 466 |
| | | | | TCCTGCCCAT | | | | |
| 413433 | n/a | n/a | 5-10-5 | GCCTGGACAA | 86 | 32431 | 32450 | 425 |
| | | | | GTCCTGCCCA | | | | |
| 423523 | n/a | n/a | 3-14-3 | GCCTGGACAA | 84 | 32431 | 32450 | 425 |
| | | | | GTCCTGCCCA | | | | |
| 423601 | n/a | n/a | 2-13-5 | GCCTGGACAA | 78 | 32431 | 32450 | 425 |
| | | | | GTCCTGCCCA | | | | |
| 423463 | n/a | n/a | 5-10-5 | AGCCTGGACA | 79 | 32432 | 32451 | 467 |
| | | | | AGTCCTGCCC | | | | |
| 423524 | n/a | n/a | 3-14-3 | AGCCTGGACA | 82 | 32432 | 32451 | 467 |
| | | | | AGTCCTGCCC | | | | |
| 423602 | n/a | n/a | 2-13-5 | AGCCTGGACA | 75 | 32432 | 32451 | 467 |
| | | | | AGTCCTGCCC | | | | |
| 423464 | n/a | n/a | 5-10-5 | CAGCCTGGAC | 84 | 32433 | 32452 | 468 |
| | | | | AAGTCCTGCC | | | | |
| 423525 | n/a | n/a | 3-14-3 | CAGCCTGGAC | 72 | 32433 | 32452 | 468 |
| | | | | AAGTCCTGCC | | | | |
| 423603 | n/a | n/a | 2-13-5 | CAGCCTGGAC | 72 | 32433 | 32452 | 468 |
| | | | | AAGTCCTGCC | | | | |
| 423465 | n/a | n/a | 5-10-5 | GCAGCCTGGA | 70 | 32434 | 32453 | 469 |
| | | | | CAAGTCCTGC | | | | |
| 423526 | n/a | n/a | 3-14-3 | GCAGCCTGGA | 83 | 32434 | 32453 | 469 |
| | | | | CAAGTCCTGC | | | | |
| 423604 | n/a | n/a | 2-13-5 | GCAGCCTGGA | 77 | 32434 | 32453 | 469 |
| | | | | CAAGTCCTGC | | | | |
| 423466 | n/a | n/a | 5-10-5 | TGCAGCCTGG | 67 | 32435 | 32454 | 470 |
| | | | | ACAAGTCCTG | | | | |
| 423527 | n/a | n/a | 3-14-3 | TGCAGCCTGG | 77 | 32435 | 32454 | 470 |
| | | | | ACAAGTCCTG | | | | |
| 413191 | 467 | 486 | 5-10-5 | CACTGGAGCA | 48 | 25593 | 25612 | 181 |
| | | | | CTGAGATGAC | | | | |
| 423502 | 467 | 486 | 3-14-3 | CACTGGAGCA | 55 | 25593 | 25612 | 181 |
| | | | | CTGAGATGAC | | | | |
| 423580 | 467 | 486 | 2-13-5 | CACTGGAGCA | 61 | 25593 | 25612 | 181 |
| | | | | CTGAGATGAC | | | | |
| 423449 | 468 | 487 | 5-10-5 | CCACTGGAGC | 71 | 25594 | 25613 | 452 |
| | | | | ACTGAGATGA | | | | |
| 423503 | 468 | 487 | 3-14-3 | CCACTGGAGC | 62 | 25594 | 25613 | 452 |
| | | | | ACTGAGATGA | | | | |
| 423581 | 468 | 487 | 2-13-5 | CCACTGGAGC | 54 | 25594 | 25613 | 452 |
| | | | | ACTGAGATGA | | | | |
| 423450 | 469 | 488 | 5-10-5 | CCCACTGGAG | 78 | 25595 | 25614 | 453 |
| | | | | CACTGAGATG | | | | |
| 423504 | 469 | 488 | 3-14-3 | CCCACTGGAG | 75 | 25595 | 25614 | 453 |
| | | | | CACTGAGATG | | | | |
| 423582 | 469 | 488 | 2-13-5 | CCCACTGGAG | 70 | 25595 | 25614 | 453 |
| | | | | CACTGAGATG | | | | |
| 334178 | 470 | 489 | 5-10-5 | ACCCACTGGA | 72 | 25596 | 25615 | 454 |
| | | | | GCACTGAGAT | | | | |
| 423505 | 470 | 489 | 3-14-3 | ACCCACTGGA | 59 | 25596 | 25615 | 454 |
| | | | | GCACTGAGAT | | | | |
| 423583 | 470 | 489 | 2-13-5 | ACCCACTGGA | 52 | 25596 | 25615 | 454 |
| | | | | GCACTGAGAT | | | | |
| 423451 | 471 | 490 | 5-10-5 | GACCCACTGG | 69 | 25597 | 25616 | 455 |
| | | | | AGCACTGAGA | | | | |
| 423506 | 471 | 490 | 3-14-3 | GACCCACTGG | 56 | 25597 | 25616 | 455 |
| | | | | AGCACTGAGA | | | | |
| 423584 | 471 | 490 | 2-13-5 | GACCCACTGG | 70 | 25597 | 25616 | 455 |
| | | | | AGCACTGAGA | | | | |
| 423452 | 472 | 491 | 5-10-5 | GGACCCACTG | 84 | 25598 | 25617 | 456 |
| | | | | GAGCACTGAG | | | | |
| 423507 | 472 | 491 | 3-14-3 | GGACCCACTG | 82 | 25598 | 25617 | 456 |
| | | | | GAGCACTGAG | | | | |
| 423585 | 472 | 491 | 2-13-5 | GGACCCACTG | 86 | 25598 | 25617 | 456 |
| | | | | GAGCACTGAG | | | | |
| 413192 | 473 | 492 | 5-10-5 | AGGACCCACT | 70 | 25599 | 25618 | 182 |
| | | | | GGAGCACTGA | | | | |
| 423508 | 473 | 492 | 3-14-3 | AGGACCCACT | 82 | 25599 | 25618 | 182 |
| | | | | GGAGCACTGA | | | | |
| 423586 | 473 | 492 | 2-13-5 | AGGACCCACT | 75 | 25599 | 25618 | 182 |
| | | | | GGAGCACTGA | | | | |
| 423453 | 474 | 493 | 5-10-5 | CAGGACCCAC | 80 | 25600 | 25619 | 457 |
| | | | | TGGAGCACTG | | | | |
| 423509 | 474 | 493 | 3-14-3 | CAGGACCCAC | 71 | 25600 | 25619 | 457 |
| | | | | TGGAGCACTG | | | | |
| 423587 | 474 | 493 | 2-13-5 | CAGGACCCAC | 78 | 25600 | 25619 | 457 |
| | | | | TGGAGCACTG | | | | |
| 423454 | 475 | 494 | 5-10-5 | ACAGGACCCA | 79 | 25601 | 25620 | 458 |
| | | | | CTGGAGCACT | | | | |
| 423510 | 475 | 494 | 3-14-3 | ACAGGACCCA | 61 | 25601 | 25620 | 458 |
| | | | | CTGGAGCACT | | | | |
| 423588 | 475 | 494 | 2-13-5 | ACAGGACCCA | 68 | 25601 | 25620 | 458 |
| | | | | CTGGAGCACT | | | | |
| 413193 | 476 | 495 | 5-10-5 | GACAGGACCC | 69 | 25602 | 25621 | 183 |
| | | | | ACTGGAGCAC | | | | |
| 423511 | 476 | 495 | 3-14-3 | GACAGGACCC | 58 | 25602 | 25621 | 183 |
| | | | | ACTGGAGCAC | | | | |
| 423589 | 476 | 495 | 2-13-5 | GACAGGACCC | 73 | 25602 | 25621 | 183 |
| | | | | ACTGGAGCAC | | | | |
| 413212 | 625 | 644 | 5-10-5 | TTCGGACCCA | 75 | 31557 | 31576 | 202 |
| | | | | CTGTGACCTC | | | | |
| 423512 | 625 | 644 | 3-14-3 | TTCGGACCCA | 64 | 31557 | 31576 | 202 |
| | | | | CTGTGACCTC | | | | |
| 423590 | 625 | 644 | 2-13-5 | TTCGGACCCA | 71 | 31557 | 31576 | 202 |
| | | | | CTGTGACCTC | | | | |
| 423455 | 626 | 645 | 5-10-5 | TTTCGGACCC | 65 | 31558 | 31577 | 459 |
| | | | | ACTGTGACCT | | | | |
| 423513 | 626 | 645 | 3-14-3 | TTTCGGACCC | 61 | 31558 | 31577 | 459 |
| | | | | ACTGTGACCT | | | | |
| 423591 | 626 | 645 | 2-13-5 | TTTCGGACCC | 68 | 31558 | 31577 | 459 |
| | | | | ACTGTGACCT | | | | |
| 423456 | 627 | 646 | 5-10-5 | GTTTCGGACC | 65 | 31559 | 31578 | 460 |
| | | | | CACTGTGACC | | | | |
| 423514 | 627 | 646 | 3-14-3 | GTTTCGGACC | 71 | 31559 | 31578 | 460 |
| | | | | CACTGTGACC | | | | |
| 423592 | 627 | 646 | 2-13-5 | GTTTCGGACC | 70 | 31559 | 31578 | 460 |
| | | | | CACTGTGACC | | | | |
| 423457 | 628 | 647 | 5-10-5 | AGTTTCGGAC | 63 | 31560 | 31579 | 461 |
| | | | | CCACTGTGAC | | | | |
| 423515 | 628 | 647 | 3-14-3 | AGTTTCGGAC | 60 | 31560 | 31579 | 461 |
| | | | | CCACTGTGAC | | | | |
| 423593 | 628 | 647 | 2-13-5 | AGTTTCGGAC | 64 | 31560 | 31579 | 461 |
| | | | | CCACTGTGAC | | | | |
| 413213 | 629 | 648 | 5-10-5 | CAGTTTCGGA | 74 | 31561 | 31580 | 203 |
| | | | | CCCACTGTGA | | | | |
| 423516 | 629 | 648 | 3-14-3 | CAGTTTCGGA | 58 | 31561 | 31580 | 203 |
| | | | | CCCACTGTGA | | | | |
| 423594 | 629 | 648 | 2-13-5 | CAGTTTCGGA | 77 | 31561 | 31580 | 203 |
| | | | | CCCACTGTGA | | | | |
| 423458 | 630 | 649 | 5-10-5 | CCAGTTTCGG | 83 | 31562 | 31581 | 462 |
| | | | | ACCCACTGTG | | | | |
| 423517 | 630 | 649 | 3-14-3 | CCAGTTTCGG | 82 | 31562 | 31581 | 462 |
| | | | | ACCCACTGTG | | | | |
| 423595 | 630 | 649 | 2-13-5 | CCAGTTTCGG | 80 | 31562 | 31581 | 462 |
| | | | | ACCCACTGTG | | | | |
| 423459 | 631 | 650 | 5-10-5 | CCCAGTTTCG | 85 | 31563 | 31582 | 463 |
| | | | | GACCCACTGT | | | | |
| 423518 | 631 | 650 | 3-14-3 | CCCAGTTTCG | 76 | 31563 | 31582 | 463 |
| | | | | GACCCACTGT | | | | |
| 423596 | 631 | 650 | 2-13-5 | CCCAGTTTCG | 70 | 31563 | 31582 | 463 |
| | | | | GACCCACTGT | | | | |
| 413214 | 632 | 651 | 5-10-5 | GCCCAGTTTC | 89 | 31564 | 31583 | 204 |
| | | | | GGACCCACTG | | | | |
| 423519 | 632 | 651 | 3-14-3 | GCCCAGTTTC | 81 | 31564 | 31583 | 204 |
| | | | | GGACCCACTG | | | | |
| 423597 | 632 | 651 | 2-13-5 | GCCCAGTTTC | 82 | 31564 | 31583 | 204 |
| | | | | GGACCCACTG | | | | |
| 217328 | 938 | 957 | 5-10-5 | GCATTGCCAC | 82 | 38091 | 38110 | 144 |
| | | | | TCCCATTCTT | | | | |

TABLE 9
Inhibition of DGAT2 mRNA by MOE gapmers targeting
SEQ ID NO: 1 and 2

| | SEQ | SEQ | | | | | | |
|---|---|---|---|---|---|---|---|---|
| | ID | ID | | | | SEQ | SEQ | |
| | NO: | NO: | | | | ID | ID | |
| | 1 | 1 | | | | NO: 2 | NO: 2 | SEQ |
| ISIS | Start | Stop | | | % | Start | Stop | ID |
| NO | Site | Site | Motif | Sequence | inhibition | Site | Site | NO |
| 334177 | 275 | 294 | 5-10-5 | AGGACCCCGGAGTAGGCGGC | 76 | 9896 | 9915 | 145 |
| 423528 | 275 | 294 | 3-14-3 | AGGACCCCGGAGTAGGCGGC | 76 | 9896 | 9915 | 145 |
| 423606 | 275 | 294 | 2-13-5 | AGGACCCCGGAGTAGGCGGC | 81 | 9896 | 9915 | 145 |
| 423467 | 276 | 295 | 5-10-5 | CAGGACCCCGGAGTAGGCGG | 75 | 9897 | 9916 | 471 |
| 423529 | 276 | 295 | 3-14-3 | CAGGACCCCGGAGTAGGCGG | 53 | 9897 | 9916 | 471 |
| 423607 | 276 | 295 | 2-13-5 | CAGGACCCCGGAGTAGGCGG | 76 | 9897 | 9916 | 471 |
| 423468 | 277 | 296 | 5-10-5 | GCAGGACCCCGGAGTAGGCG | 58 | 9898 | 9917 | 472 |
| 423530 | 277 | 296 | 3-14-3 | GCAGGACCCCGGAGTAGGCG | 70 | 9898 | 9917 | 472 |
| 423608 | 277 | 296 | 2-13-5 | GCAGGACCCCGGAGTAGGCG | 68 | 9898 | 9917 | 472 |
| 381726 | 278 | 297 | 5-10-5 | CGCAGGACCCCGGAGTAGGC | 70 | 9899 | 9918 | 38 |
| 423531 | 278 | 297 | 3-14-3 | CGCAGGACCCCGGAGTAGGC | 65 | 9899 | 9918 | 38 |
| 423609 | 278 | 297 | 2-13-5 | CGCAGGACCCCGGAGTAGGC | 71 | 9899 | 9918 | 38 |
| 423469 | 279 | 298 | 5-10-5 | GCGCAGGACCCCGGAGTAGG | 79 | 9900 | 9919 | 473 |
| 423532 | 279 | 298 | 3-14-3 | GCGCAGGACCCCGGAGTAGG | 71 | 9900 | 9919 | 473 |
| 423610 | 279 | 298 | 2-13-5 | GCGCAGGACCCCGGAGTAGG | 72 | 9900 | 9919 | 473 |
| 423470 | 280 | 299 | 5-10-5 | CGCGCAGGACCCCGGAGTAG | 74 | 9901 | 9920 | 474 |
| 423533 | 280 | 299 | 3-14-3 | CGCGCAGGACCCCGGAGTAG | 69 | 9901 | 9920 | 474 |
| 423611 | 280 | 299 | 2-13-5 | CGCGCAGGACCCCGGAGTAG | 67 | 9901 | 9920 | 474 |
| 423471 | 281 | 300 | 5-10-5 | CCGCGCAGGACCCCGGAGTA | 75 | 9902 | 9921 | 475 |
| 423534 | 281 | 300 | 3-14-3 | CCGCGCAGGACCCCGGAGTA | 71 | 9902 | 9921 | 475 |
| 411873 | 686 | 705 | 5-10-5 | TTGTGTGTCTTCACCAGCTG | 73 | 37214 | 37233 | 46 |
| 423542 | 686 | 705 | 3-14-3 | TTGTGTGTCTTCACCAGCTG | 60 | 37214 | 37233 | 46 |
| 423620 | 686 | 705 | 2-13-5 | TTGTGTGTCTTCACCAGCTG | 71 | 37214 | 37233 | 46 |
| 411898 | 687 | 706 | 5-10-5 | GTTGTGTGTCTTCACCAGCT | 68 | 37215 | 37234 | 61 |
| 423543 | 687 | 706 | 3-14-3 | GTTGTGTGTCTTCACCAGCT | 56 | 37215 | 37234 | 61 |
| 423621 | 687 | 706 | 2-13-5 | GTTGTGTGTCTTCACCAGCT | 65 | 37215 | 37234 | 61 |
| 217316 | 688 | 707 | 5-10-5 | GGTTGTGTGTCTTCACCAGC | 70 | 37216 | 37235 | 20 |
| 423544 | 688 | 707 | 3-14-3 | GGTTGTGTGTCTTCACCAGC | 70 | 37216 | 37235 | 20 |
| 423622 | 688 | 707 | 2-13-5 | GGTTGTGTGTCTTCACCAGC | 68 | 37216 | 37235 | 20 |
| 381727 | 689 | 708 | 5-10-5 | AGGTTGTGTGTCTTCACCAG | 74 | 37217 | 37236 | 39 |
| 423545 | 689 | 708 | 3-14-3 | AGGTTGTGTGTCTTCACCAG | 61 | 37217 | 37236 | 39 |
| 423623 | 689 | 708 | 2-13-5 | AGGTTGTGTGTCTTCACCAG | 61 | 37217 | 37236 | 39 |
| 411899 | 690 | 709 | 5-10-5 | CAGGTTGTGTGTCTTCACCA | 76 | 37218 | 37237 | 62 |
| 423546 | 690 | 709 | 3-14-3 | CAGGTTGTGTGTCTTCACCA | 68 | 37218 | 37237 | 62 |
| 423624 | 690 | 709 | 2-13-5 | CAGGTTGTGTGTCTTCACCA | 62 | 37218 | 37237 | 62 |
| 411874 | 691 | 710 | 5-10-5 | GCAGGTTGTGTGTCTTCACC | 73 | 37219 | 37238 | 47 |
| 423547 | 691 | 710 | 3-14-3 | GCAGGTTGTGTGTCTTCACC | 69 | 37219 | 37238 | 47 |
| 423625 | 691 | 710 | 2-13-5 | GCAGGTTGTGTGTCTTCACC | 56 | 37219 | 37238 | 47 |
| 411900 | 692 | 711 | 5-10-5 | AGCAGGTTGTGTGTCTTCAC | 77 | 37220 | 37239 | 63 |
| 423548 | 692 | 711 | 3-14-3 | AGCAGGTTGTGTGTCTTCAC | 63 | 37220 | 37239 | 63 |
| 423626 | 692 | 711 | 2-13-5 | AGCAGGTTGTGTGTCTTCAC | 44 | 37220 | 37239 | 63 |
| 217317 | 693 | 712 | 5-10-5 | CAGCAGGTTGTGTGTCTTCA | 75 | 37221 | 37240 | 21 |
| 423549 | 693 | 712 | 3-14-3 | CAGCAGGTTGTGTGTCTTCA | 47 | 37221 | 37240 | 21 |
| 423627 | 693 | 712 | 2-13-5 | CAGCAGGTTGTGTGTCTTCA | 57 | 37221 | 37240 | 21 |
| 381728 | 694 | 713 | 5-10-5 | TCAGCAGGTTGTGTGTCTTC | 56 | 37222 | 37241 | 40 |
| 423550 | 694 | 713 | 3-14-3 | TCAGCAGGTTGTGTGTCTTC | 54 | 37222 | 37241 | 40 |
| 423628 | 694 | 713 | 2-13-5 | TCAGCAGGTTGTGTGTCTTC | 57 | 37222 | 37241 | 40 |
| 411901 | 695 | 714 | 5-10-5 | GTCAGCAGGTTGTGTGTCTT | 59 | 37223 | 37242 | 64 |
| 423551 | 695 | 714 | 3-14-3 | GTCAGCAGGTTGTGTGTCTT | 61 | 37223 | 37242 | 64 |
| 423629 | 695 | 714 | 2-13-5 | GTCAGCAGGTTGTGTGTCTT | 58 | 37223 | 37242 | 64 |
| 411875 | 696 | 715 | 5-10-5 | GGTCAGCAGGTTGTGTGTCT | 62 | 37224 | 37243 | 48 |
| 423552 | 696 | 715 | 3-14-3 | GGTCAGCAGGTTGTGTGTCT | 57 | 37224 | 37243 | 48 |
| 423630 | 696 | 715 | 2-13-5 | GGTCAGCAGGTTGTGTGTCT | 45 | 37224 | 37243 | 48 |
| 411902 | 697 | 716 | 5-10-5 | TGGTCAGCAGGTTGTGTGTC | 43 | 37225 | 37244 | 65 |
| 423553 | 697 | 716 | 3-14-3 | TGGTCAGCAGGTTGTGTGTC | 57 | 37225 | 37244 | 65 |
| 423631 | 697 | 716 | 2-13-5 | TGGTCAGCAGGTTGTGTGTC | 57 | 37225 | 37244 | 65 |
| 413231 | 814 | 833 | 5-10-5 | GGTAAGGCCGTATGCCTGGG | 71 | 37342 | 37361 | 221 |
| 423535 | 814 | 833 | 3-14-3 | GGTAAGGCCGTATGCCTGGG | 51 | 37342 | 37361 | 221 |
| 423613 | 814 | 833 | 2-13-5 | GGTAAGGCCGTATGCCTGGG | 53 | 37342 | 37361 | 221 |
| 423472 | 815 | 834 | 5-10-5 | AGGTAAGGCCGTATGCCTGG | 72 | 37343 | 37362 | 476 |
| 423536 | 815 | 834 | 3-14-3 | AGGTAAGGCCGTATGCCTGG | 67 | 37343 | 37362 | 476 |
| 423614 | 815 | 834 | 2-13-5 | AGGTAAGGCCGTATGCCTGG | 63 | 37343 | 37362 | 476 |
| 423473 | 816 | 835 | 5-10-5 | CAGGTAAGGCCGTATGCCTG | 63 | 37344 | 37363 | 477 |
| 423537 | 816 | 835 | 3-14-3 | CAGGTAAGGCCGTATGCCTG | 72 | 37344 | 37363 | 477 |
| 423615 | 816 | 835 | 2-13-5 | CAGGTAAGGCCGTATGCCTG | 59 | 37344 | 37363 | 477 |
| 413232 | 817 | 836 | 5-10-5 | CCAGGTAAGGCCGTATGCCT | 76 | 37345 | 37364 | 225 |
| 423538 | 817 | 836 | 3-14-3 | CCAGGTAAGGCCGTATGCCT | 71 | 37345 | 37364 | 225 |
| 423616 | 817 | 836 | 2-13-5 | CCAGGTAAGGCCGTATGCCT | 64 | 37345 | 37364 | 225 |
| 423474 | 818 | 837 | 5-10-5 | GCCAGGTAAGGCCGTATGCC | 68 | 37346 | 37365 | 478 |
| 423539 | 818 | 837 | 3-14-3 | GCCAGGTAAGGCCGTATGCC | 61 | 37346 | 37365 | 478 |
| 423617 | 818 | 837 | 2-13-5 | GCCAGGTAAGGCCGTATGCC | 66 | 37346 | 37365 | 478 |
| 423475 | 819 | 838 | 5-10-5 | AGCCAGGTAAGGCCGTATGC | 70 | 37347 | 37366 | 479 |
| 423540 | 819 | 838 | 3-14-3 | AGCCAGGTAAGGCCGTATGC | 51 | 37347 | 37366 | 479 |
| 423618 | 819 | 838 | 2-13-5 | AGCCAGGTAAGGCCGTATGC | 67 | 37347 | 37366 | 479 |
| 413233 | 820 | 839 | 5-10-5 | TAGCCAGGTAAGGCCGTATG | 60 | 37348 | 37367 | 226 |
| 423541 | 820 | 839 | 3-14-3 | TAGCCAGGTAAGGCCGTATG | 49 | 37348 | 37367 | 226 |
| 423619 | 820 | 839 | 2-13-5 | TAGCCAGGTAAGGCCGTATG | 51 | 37348 | 37367 | 226 |
| 217328 | 938 | 957 | 5-10-5 | GCATTGCCACTCCCATTCTT | 82 | 38091 | 38110 | 144 |

TABLE 10
Inhibition of DGAT2 mRNA by MOE gapmers
targeting SEQ ID NO: 1 and 2

| | SEQ | SEQ | | | | SEQ | SEQ | |
|---|---|---|---|---|---|---|---|---|
| | ID | ID | | | % | ID | ID | |
| | NO: | NO: | | | in- | NO: | NO: | |
| | 1 | 1 | | | hi- | 2 | 2 | SEQ |
| ISIS | Start | Stop | | | bi- | Start | Stop | ID |
| NO | Site | Site | Motif | Sequence | tion | Site | Site | NO |
| 413251 | 935 | 954 | 5-10-5 | TTGCCACTCC | 57 | 38088 | 38107 | 244 |
| | | | | CATTCTTTGA | | | | |
| 423476 | 935 | 954 | 3-14-3 | TTGCCACTCC | 59 | 38088 | 38107 | 244 |
| | | | | CATTCTTTGA | | | | |
| 423554 | 935 | 954 | 2-13-5 | TTGCCACTCC | 57 | 38088 | 38107 | 244 |
| | | | | CATTCTTTGA | | | | |
| 423435 | 936 | 955 | 5-10-5 | ATTGCCACTC | 35 | 38089 | 38108 | 480 |
| | | | | CCATTCTTTG | | | | |
| 423477 | 936 | 955 | 3-14-3 | ATTGCCACTC | 40 | 38089 | 38108 | 480 |
| | | | | CCATTCTTTG | | | | |
| 423555 | 936 | 955 | 2-13-5 | ATTGCCACTC | 53 | 38089 | 38108 | 480 |
| | | | | CCATTCTTTG | | | | |
| 423436 | 937 | 956 | 5-10-5 | CATTGCCACT | 44 | 38090 | 38109 | 481 |
| | | | | CCCATTCTTT | | | | |
| 423478 | 937 | 956 | 3-14-3 | CATTGCCACT | 46 | 38090 | 38109 | 481 |
| | | | | CCCATTCTTT | | | | |
| 423556 | 937 | 956 | 2-13-5 | CATTGCCACT | 40 | 38090 | 38109 | 481 |
| | | | | CCCATTCTTT | | | | |
| 217328 | 938 | 957 | 5-10-5 | GCATTGCCAC | 85 | 38091 | 38110 | 144 |
| | | | | TCCCATTCTT | | | | |
| 423479 | 938 | 957 | 3-14-3 | GCATTGCCAC | 85 | 38091 | 38110 | 144 |
| | | | | TCCCATTCTT | | | | |
| 423557 | 938 | 957 | 2-13-5 | GCATTGCCAC | 61 | 38091 | 38110 | 144 |
| | | | | TCCCATTCTT | | | | |
| 380133 | 939 | 958 | 5-10-5 | AGCATTGCCA | 74 | 38092 | 38111 | 482 |
| | | | | CTCCCATTCT | | | | |
| 423480 | 939 | 958 | 3-14-3 | AGCATTGCCA | 67 | 38092 | 38111 | 482 |
| | | | | CTCCCATTCT | | | | |
| 423558 | 939 | 958 | 2-13-5 | AGCATTGCCA | 50 | 38092 | 38111 | 482 |
| | | | | CTCCCATTCT | | | | |
| 423437 | 940 | 959 | 5-10-5 | TAGCATTGCC | 71 | 38093 | 38112 | 483 |
| | | | | ACTCCCATTC | | | | |
| 423481 | 940 | 959 | 3-14-3 | TAGCATTGCC | 68 | 38093 | 38112 | 483 |
| | | | | ACTCCCATTC | | | | |
| 423559 | 940 | 959 | 2-13-5 | TAGCATTGCC | 60 | 38093 | 38112 | 483 |
| | | | | ACTCCCATTC | | | | |
| 423438 | 941 | 960 | 5-10-5 | ATAGCATTGC | 57 | 38094 | 38113 | 484 |
| | | | | CACTCCCATT | | | | |
| 423482 | 941 | 960 | 3-14-3 | ATAGCATTGC | 71 | 38094 | 38113 | 484 |
| | | | | CACTCCCATT | | | | |
| 423560 | 941 | 960 | 2-13-5 | ATAGCATTGC | 57 | 38094 | 38113 | 484 |
| | | | | CACTCCCATT | | | | |
| 423439 | 942 | 961 | 5-10-5 | GATAGCATTG | 66 | 38095 | 38114 | 485 |
| | | | | CCACTCCCAT | | | | |
| 423483 | 942 | 961 | 3-14-3 | GATAGCATTG | 75 | 38095 | 38114 | 485 |
| | | | | CCACTCCCAT | | | | |
| 423561 | 942 | 961 | 2-13-5 | GATAGCATTG | 62 | 38095 | 38114 | 485 |
| | | | | CCACTCCCAT | | | | |
| 217329 | 943 | 962 | 5-10-5 | TGATAGCATT | 64 | 38096 | 38115 | 486 |
| | | | | GCCACTCCCA | | | | |
| 423484 | 943 | 962 | 3-14-3 | TGATAGCATT | 66 | 38096 | 38115 | 486 |
| | | | | GCCACTCCCA | | | | |
| 423562 | 943 | 962 | 2-13-5 | TGATAGCATT | 69 | 38096 | 38115 | 486 |
| | | | | GCCACTCCCA | | | | |
| 413252 | 976 | 995 | 5-10-5 | TCAGAGACTC | 55 | 38129 | 38148 | 245 |
| | | | | AGCCGCACCC | | | | |
| 423485 | 976 | 995 | 3-14-3 | TCAGAGACTC | 41 | 38129 | 38148 | 245 |
| | | | | AGCCGCACCC | | | | |
| 423563 | 976 | 995 | 2-13-5 | TCAGAGACTC | 56 | 38129 | 38148 | 245 |
| | | | | AGCCGCACCC | | | | |
| 423440 | 977 | 996 | 5-10-5 | CTCAGAGACT | 80 | 38130 | 38149 | 487 |
| | | | | CAGCCGCACC | | | | |
| 423486 | 977 | 996 | 3-14-3 | CTCAGAGACT | 70 | 38130 | 38149 | 487 |
| | | | | CAGCCGCACC | | | | |
| 423564 | 977 | 996 | 2-13-5 | CTCAGAGACT | 43 | 38130 | 38149 | 487 |
| | | | | CAGCCGCACC | | | | |
| 423441 | 978 | 997 | 5-10-5 | GCTCAGAGAC | 86 | 38131 | 38150 | 488 |
| | | | | TCAGCCGCAC | | | | |
| 423487 | 978 | 997 | 3-14-3 | GCTCAGAGAC | 69 | 38131 | 38150 | 488 |
| | | | | TCAGCCGCAC | | | | |
| 423565 | 978 | 997 | 2-13-5 | GCTCAGAGAC | 82 | 38131 | 38150 | 488 |
| | | | | TCAGCCGCAC | | | | |
| 366730 | 979 | 998 | 5-10-5 | AGCTCAGAGA | 85 | 38132 | 38151 | 150 |
| | | | | CTCAGCCGCA | | | | |
| 423488 | 979 | 998 | 3-14-3 | AGCTCAGAGA | 77 | 38132 | 38151 | 150 |
| | | | | CTCAGCCGCA | | | | |
| 423566 | 979 | 998 | 2-13-5 | AGCTCAGAGA | 86 | 38132 | 38151 | 150 |
| | | | | CTCAGCCGCA | | | | |
| 423442 | 980 | 999 | 5-10-5 | GAGCTCAGAG | 81 | 38133 | 38152 | 489 |
| | | | | ACTCAGCCGC | | | | |
| 423489 | 980 | 999 | 3-14-3 | GAGCTCAGAG | 89 | 38133 | 38152 | 489 |
| | | | | ACTCAGCCGC | | | | |
| 423567 | 980 | 999 | 2-13-5 | GAGCTCAGAG | 89 | 38133 | 38152 | 489 |
| | | | | ACTCAGCCGC | | | | |
| 423443 | 981 | 1000 | 5-10-5 | GGAGCTCAGA | 73 | 38134 | 38153 | 490 |
| | | | | GACTCAGCCG | | | | |
| 423490 | 981 | 1000 | 3-14-3 | GGAGCTCAGA | 81 | 38134 | 38153 | 490 |
| | | | | GACTCAGCCG | | | | |
| 423568 | 981 | 1000 | 2-13-5 | GGAGCTCAGA | 65 | 38134 | 38153 | 490 |
| | | | | GACTCAGCCG | | | | |
| 423444 | 982 | 1001 | 5-10-5 | TGGAGCTCAG | 77 | 38135 | 38154 | 153 |
| | | | | AGACTCAGCC | | | | |
| 423491 | 982 | 1001 | 3-14-3 | TGGAGCTCAG | 76 | 38135 | 38154 | 153 |
| | | | | AGACTCAGCC | | | | |
| 423569 | 982 | 1001 | 2-13-5 | TGGAGCTCAG | 82 | 38135 | 38154 | 153 |
| | | | | AGACTCAGCC | | | | |
| 423445 | 983 | 1002 | 5-10-5 | ATGGAGCTCA | 78 | 38136 | 38155 | 491 |
| | | | | GAGACTCAGC | | | | |
| 423492 | 983 | 1002 | 3-14-3 | ATGGAGCTCA | 71 | 38136 | 38155 | 491 |
| | | | | GAGACTCAGC | | | | |
| 423570 | 983 | 1002 | 2-13-5 | ATGGAGCTCA | 73 | 38136 | 38155 | 491 |
| | | | | GAGACTCAGC | | | | |
| 366731 | 984 | 1003 | 5-10-5 | CATGGAGCTC | 65 | 38137 | 38156 | 492 |
| | | | | AGAGACTCAG | | | | |
| 423493 | 984 | 1003 | 3-14-3 | CATGGAGCTC | 62 | 38137 | 38156 | 492 |
| | | | | AGAGACTCAG | | | | |
| 423571 | 984 | 1003 | 2-13-5 | CATGGAGCTC | 71 | 38137 | 38156 | 492 |
| | | | | AGAGACTCAG | | | | |
| 423446 | 985 | 1004 | 5-10-5 | GCATGGAGCT | 69 | 38138 | 38157 | 493 |
| | | | | CAGAGACTCA | | | | |
| 423494 | 985 | 1004 | 3-14-3 | GCATGGAGCT | 51 | 38138 | 38157 | 493 |
| | | | | CAGAGACTCA | | | | |
| 423572 | 985 | 1004 | 2-13-5 | GCATGGAGCT | 77 | 38138 | 38157 | 493 |
| | | | | CAGAGACTCA | | | | |
| 423447 | 986 | 1005 | 5-10-5 | GGCATGGAGC | 77 | 38139 | 38158 | 494 |
| | | | | TCAGAGACTC | | | | |
| 423495 | 986 | 1005 | 3-14-3 | GGCATGGAGC | 74 | 38139 | 38158 | 494 |
| | | | | TCAGAGACTC | | | | |
| 423573 | 986 | 1005 | 2-13-5 | GGCATGGAGC | 77 | 38139 | 38158 | 494 |
| | | | | TCAGAGACTC | | | | |
| 413253 | 987 | 1006 | 5-10-5 | AGGCATGGAG | 83 | 38140 | 38159 | 246 |
| | | | | CTCAGAGACT | | | | |
| 423496 | 987 | 1006 | 3-14-3 | AGGCATGGAG | 66 | 38140 | 38159 | 246 |
| | | | | CTCAGAGACT | | | | |
| 423574 | 987 | 1006 | 2-13-5 | AGGCATGGAG | 78 | 38140 | 38159 | 246 |
| | | | | CTCAGAGACT | | | | |
| 423448 | 988 | 1007 | 5-10-5 | CAGGCATGGA | 57 | 38141 | 38160 | 495 |
| | | | | GCTCAGAGAC | | | | |
| 423497 | 988 | 1007 | 3-14-3 | CAGGCATGGA | 76 | 38141 | 38160 | 495 |
| | | | | GCTCAGAGAC | | | | |
| 423575 | 988 | 1007 | 2-13-5 | CAGGCATGGA | 70 | 38141 | 38160 | 495 |
| | | | | GCTCAGAGAC | | | | |
| 369255 | 1339 | 1358 | 5-10-5 | CCAGGGCCTC | 83 | 41310 | 41329 | 103 |
| | | | | CATGTACATG | | | | |
| 423498 | 1339 | 1358 | 3-14-3 | CCAGGGCCTC | 86 | 41310 | 41329 | 103 |
| | | | | CATGTACATG | | | | |
| 423576 | 1339 | 1358 | 2-13-5 | CCAGGGCCTC | 69 | 41310 | 41329 | 103 |
| | | | | CATGTACATG | | | | |
| 411944 | 1340 | 1359 | 5-10-5 | ACCAGGGCCT | 85 | 41311 | 41330 | 120 |
| | | | | CCATGTACAT | | | | |
| 423499 | 1340 | 1359 | 3-14-3 | ACCAGGGCCT | 84 | 41311 | 41330 | 120 |
| | | | | CCATGTACAT | | | | |
| 423577 | 1340 | 1359 | 2-13-5 | ACCAGGGCCT | 50 | 41311 | 41330 | 120 |
| | | | | CCATGTACAT | | | | |
| 411945 | 1341 | 1360 | 5-10-5 | CACCAGGGCC | 80 | 41312 | 41331 | 121 |
| | | | | TCCATGTACA | | | | |
| 423500 | 1341 | 1360 | 3-14-3 | CACCAGGGCC | 41 | 41312 | 41331 | 121 |
| | | | | TCCATGTACA | | | | |
| 423578 | 1341 | 1360 | 2-13-5 | CACCAGGGCC | 69 | 41312 | 41331 | 121 |
| | | | | TCCATGTACA | | | | |
| 411946 | 1342 | 1361 | 5-10-5 | TCACCAGGGC | 65 | 41313 | 41332 | 122 |
| | | | | CTCCATGTAC | | | | |
| 423501 | 1342 | 1361 | 3-14-3 | TCACCAGGGC | 68 | 41313 | 41332 | 122 |
| | | | | CTCCATGTAC | | | | |
| 423579 | 1342 | 1361 | 2-13-5 | TCACCAGGGC | 3 | 41313 | 41332 | 122 |
| | | | | CTCCATGTAC | | | | |

### Example 3: Antisense Inhibition of Human DGAT2 in HepG2 Cells by MOE Gapmers

[0455] Antisense oligonucleotides were designed targeting a DGAT2 nucleic acid and were tested for their effects on DGAT2 mRNA in vitro. The antisense oligonucleotides were tested in a series of experiments that had similar culture conditions. Previously disclosed oligonucleotides, ISIS 217317, 217328, ISIS 366722, ISIS 366710, ISIS 366714, ISIS 366728, ISIS 366746, and ISIS 369255 were included in this study as benchmark oligonucleotides. The results for each experiment are presented in separate tables shown below. Cultured HepG2 cells at a density of 20,000 cells per well were transfected using electroporation with 4,500 nM antisense oligonucleotide. After a treatment period of approximately 24 hours, RNA was isolated from the cells and DGAT2 mRNA levels were measured by quantitative real-time PCR. Human primer probe set RTS2988 MGB was used to measure mRNA levels. The potency of some oligonucleotides was measured with human primer probe set RTS2367 (forward sequence GGCCTCCCGGAGACTGA, designated herein as SEQ ID NO: 4; reverse sequence AAGTGATTTGCAGCTGGTTCCT, designated herein as SEQ ID NO: 5; probe sequence AGGTGAACTGAGCCAGCCTTCGGG, designated herein as SEQ ID NO: 6). DGAT2 mRNA levels were adjusted according to total RNA content, as measured by RIBOGREEN®. Results are presented as percent inhibition of DGAT2, relative to untreated control cells. The results show several antisense oligonucleotides demonstrate greater potency than the benchmark oligonucleotides.

[0456] The newly designed chimeric antisense oligonucleotides in the Tables below were designed as 5-10-5 MOE gapmers. The 5-10-5 MOE gapmers are 20 nucleosides in length, wherein the central gap segment comprises of ten 2′-deoxynucleosides and is flanked by wing segments on the 5′ direction and the 3′ direction comprising five nucleosides each. Each nucleoside in the 5′ wing segment and each nucleoside in the 3′ wing segment has a 2′-MOE modification. The internucleoside linkages throughout each gapmer are phosphorothioate (P═S) linkages. All cytosine residues throughout each gapmer are 5-methylcytosines. “Start site” indicates the 5′-most nucleoside to which the gapmer is targeted in the human gene sequence. “Stop site” indicates the 3′-most nucleoside to which the gapmer is targeted in the human gene sequence. Each gapmer listed in the Tables below is targeted to SEQ ID NO: 1, SEQ ID NO: 2, or both. ‘n/a’ indicates that the antisense oligonucleotide does not target that particular gene sequence with 100% complementarity. In case the sequence alignment for a target gene sequence in a particular table is not shown, it is understood that none of the oligonucleotides presented in that table align with 100% complementarity with that target gene sequence.

TABLE 7
Inhibition of DGAT2 mRNA by 5-10-5 MOE
gapmers targeting SEQ ID NO: 2

| | SEQ | SEQ | | | |
|---|---|---|---|---|---|
| | ID | ID | | | |
| | NO: | NO: | | | |
| | 2 | 2 | | % | SEQ |
| ISIS | Start | Stop | | inhi- | ID |
| NO | Site | Site | Sequence | bition | NO |
| 334177 | 9896 | 9915 | AGGACCCCGGAGTAGGCGGC | 76 | 145 |
| 366710 | 25551 | 25570 | GACCTATTGAGCCAGGTGAC | 60 | 146 |
| 366722 | 31097 | 31116 | GTGCAGAATATGTACATGAG | 50 | 148 |
| 413433 | 32431 | 32450 | GCCTGGACAAGTCCTGCCCA | 80 | 425 |
| 523014 | 35670 | 35689 | TTCTACTCAAAAATATACAT | 23 | 4084 |
| 495875 | 36249 | 36268 | TAAGGGTATTCTGCTCATAA | 73 | 2148 |
| 495876 | 36250 | 36269 | GTAAGGGTATTCTGCTCATA | 83 | 2149 |
| 495877 | 36251 | 36270 | AGTAAGGGTATTCTGCTCAT | 82 | 2150 |
| 495878 | 36252 | 36271 | GAGTAAGGGTATTCTGCTCA | 89 | 2151 |
| 523015 | 36254 | 36273 | ATGAGTAAGGGTATTCTGCT | 68 | 4085 |
| 523016 | 36255 | 36274 | AATGAGTAAGGGTATTCTGC | 65 | 4086 |
| 523017 | 36256 | 36275 | CAATGAGTAAGGGTATTCTG | 39 | 4087 |
| 523018 | 36257 | 36276 | ACAATGAGTAAGGGTATTCT | 25 | 4088 |
| 495879 | 36259 | 36278 | AGACAATGAGTAAGGGTATT | 64 | 2152 |
| 495880 | 36260 | 36279 | GAGACAATGAGTAAGGGTAT | 62 | 2153 |
| 495881 | 36261 | 36280 | AGAGACAATGAGTAAGGGTA | 64 | 2154 |
| 495882 | 36262 | 36281 | GAGAGACAATGAGTAAGGGT | 66 | 2155 |
| 523019 | 36513 | 36532 | CAGCCCTGTGCCAGCCAGCC | 37 | 4089 |
| 523020 | 36514 | 36533 | ACAGCCCTGTGCCAGCCAGC | 17 | 4090 |
| 523021 | 36515 | 36534 | GACAGCCCTGTGCCAGCCAG | 52 | 4091 |
| 523022 | 36516 | 36535 | CGACAGCCCTGTGCCAGCCA | 62 | 4092 |
| 495886 | 36518 | 36537 | AGCGACAGCCCTGTGCCAGC | 57 | 2159 |
| 495887 | 36519 | 36538 | AAGCGACAGCCCTGTGCCAG | 46 | 2160 |
| 495888 | 36520 | 36539 | CAAGCGACAGCCCTGTGCCA | 28 | 2161 |
| 495889 | 36521 | 36540 | ACAAGCGACAGCCCTGTGCC | 46 | 2162 |
| 523023 | 36579 | 36598 | ACTTTCCCACAGTCAGCTGG | 59 | 4093 |
| 523024 | 36580 | 36599 | AACTTTCCCACAGTCAGCTG | 51 | 4094 |
| 523025 | 36581 | 36600 | AAACTTTCCCACAGTCAGCT | 68 | 4095 |
| 523026 | 36582 | 36601 | GAAACTTTCCCACAGTCAGC | 73 | 4096 |
| 523027 | 36584 | 36603 | TGGAAACTTTCCCACAGTCA | 68 | 4097 |
| 523028 | 36585 | 36604 | ATGGAAACTTTCCCACAGTC | 52 | 4098 |
| 523029 | 36586 | 36605 | AATGGAAACTTTCCCACAGT | 23 | 4099 |
| 523030 | 36587 | 36606 | AAATGGAAACTTTCCCACAG | 36 | 4100 |
| 523031 | 36842 | 36861 | AAATCCAACCCTTGTCACTC | 28 | 4101 |
| 523032 | 36843 | 36862 | CAAATCCAACCCTTGTCACT | 22 | 4102 |
| 523033 | 36844 | 36863 | TCAAATCCAACCCTTGTCAC | 21 | 4103 |
| 523034 | 36845 | 36864 | CTCAAATCCAACCCTTGTCA | 38 | 4104 |
| 523035 | 37120 | 37139 | TGGATGTGTCATTTCCCCTG | 69 | 4105 |
| 217328 | 38091 | 38110 | GCATTGCCACTCCCATTCTT | 73 | 144 |
| 423444 | 38135 | 38154 | TGGAGCTCAGAGACTCAGCC | 56 | 153 |
| 522979 | 39671 | 39690 | AGTGCAAGAGTTACCTCCTC | 67 | 4106 |
| 522980 | 39672 | 39691 | CAGTGCAAGAGTTACCTCCT | 67 | 4107 |
| 522981 | 39673 | 39692 | GCAGTGCAAGAGTTACCTCC | 60 | 4108 |
| 522982 | 39674 | 39693 | AGCAGTGCAAGAGTTACCTC | 63 | 4109 |
| 522983 | 39681 | 39700 | ATCAGTTAGCAGTGCAAGAG | 46 | 4110 |
| 522984 | 39682 | 39701 | TATCAGTTAGCAGTGCAAGA | 43 | 4111 |
| 522985 | 39683 | 39702 | CTATCAGTTAGCAGTGCAAG | 52 | 4112 |
| 522986 | 39684 | 39703 | CCTATCAGTTAGCAGTGCAA | 64 | 4113 |
| 522987 | 39686 | 39705 | TTCCTATCAGTTAGCAGTGC | 61 | 4114 |
| 522988 | 39687 | 39706 | ATTCCTATCAGTTAGCAGTG | 47 | 4115 |
| 522989 | 39688 | 39707 | AATTCCTATCAGTTAGCAGT | 16 | 4116 |
| 522990 | 39689 | 39708 | TAATTCCTATCAGTTAGCAG | 11 | 4117 |
| 522991 | 39814 | 39833 | TCTATGCTGCAGTCATATTA | 28 | 4118 |
| 522992 | 39815 | 39834 | GTCTATGCTGCAGTCATATT | 20 | 4119 |
| 522993 | 39816 | 39835 | GGTCTATGCTGCAGTCATAT | 45 | 4120 |
| 522994 | 39817 | 39836 | AGGTCTATGCTGCAGTCATA | 40 | 4121 |
| 522995 | 39819 | 39838 | ACAGGTCTATGCTGCAGTCA | 56 | 4122 |
| 522996 | 39820 | 39839 | GACAGGTCTATGCTGCAGTC | 70 | 4123 |
| 522997 | 39821 | 39840 | TGACAGGTCTATGCTGCAGT | 65 | 4124 |
| 522998 | 39822 | 39841 | CTGACAGGTCTATGCTGCAG | 54 | 4125 |
| 522999 | 39829 | 39848 | CACTCTTCTGACAGGTCTAT | 54 | 4126 |
| 523000 | 39830 | 39849 | CCACTCTTCTGACAGGTCTA | 70 | 4127 |
| 523001 | 39831 | 39850 | TCCACTCTTCTGACAGGTCT | 69 | 4128 |
| 523002 | 39832 | 39851 | TTCCACTCTTCTGACAGGTC | 84 | 4129 |
| 523003 | 39834 | 39853 | TTTTCCACTCTTCTGACAGG | 35 | 4130 |
| 523004 | 39835 | 39854 | GTTTTCCACTCTTCTGACAG | 25 | 4131 |
| 523005 | 39836 | 39855 | TGTTTTCCACTCTTCTGACA | 24 | 4132 |
| 523006 | 40329 | 40348 | ATCTCTTCCATCTCCACTGC | 30 | 4133 |
| 523007 | 40330 | 40349 | CATCTCTTCCATCTCCACTG | 32 | 4134 |
| 523008 | 40331 | 40350 | ACATCTCTTCCATCTCCACT | 39 | 4135 |
| 523009 | 40332 | 40351 | CACATCTCTTCCATCTCCAC | 40 | 4136 |
| 523010 | 40334 | 40353 | TGCACATCTCTTCCATCTCC | 50 | 4137 |
| 523011 | 40335 | 40354 | ATGCACATCTCTTCCATCTC | 35 | 4138 |
| 523012 | 40336 | 40355 | CATGCACATCTCTTCCATCT | 43 | 4139 |
| 523013 | 40337 | 40356 | TCATGCACATCTCTTCCATC | 28 | 4140 |
| 369255 | 41310 | 41329 | CCAGGGCCTCCATGTACATG | 33 | 103 |
| 411947 | 41315 | 41334 | CTTCACCAGGGCCTCCATGT | 22 | 123 |
| 366746 | 41337 | 41356 | TGGTCTTGTGCTTGTCGAAG | 46 | 151 |

TABLE 11
Inhibition of DGAT2 mRNA by 5-10-5 MOE
gapmers targeting SEQ ID NOs: 1 and 2

| | SEQ | SEQ | | | SEQ | SEQ | |
|---|---|---|---|---|---|---|---|
| | ID | ID | | % | ID | ID | |
| | NO: | NO: | | in- | NO: | NO: | |
| | 1 | 1 | | hi- | 2 | 2 | SEQ |
| ISIS | Start | Stop | | bi- | Start | Stop | ID |
| NO | Site | Site | Sequence | tion | Site | Site | NO |
| 413433 | n/a | n/a | GCCTGGACAA | 82 | 32431 | 32450 | 425 |
| | | | GTCCTGCCCA | | | | |
| 472154 | 105 | 124 | GACACCTGGA | 51 | 9726 | 9745 | 573 |
| | | | GCTGCGGCCG | | | | |
| 472155 | 106 | 125 | GGACACCTGG | 79 | 9727 | 9746 | 574 |
| | | | AGCTGCGGCC | | | | |
| 472156 | 107 | 126 | AGGACACCTG | 79 | 9728 | 9747 | 575 |
| | | | GAGCTGCGGC | | | | |
| 472157 | 108 | 127 | TAGGACACCT | 56 | 9729 | 9748 | 576 |
| | | | GGAGCTGCGG | | | | |
| 472158 | 110 | 129 | GCTAGGACAC | 76 | 9731 | 9750 | 577 |
| | | | CTGGAGCTGC | | | | |
| 472159 | 111 | 130 | GGCTAGGACA | 63 | 9732 | 9751 | 578 |
| | | | CCTGGAGCTG | | | | |
| 472160 | 161 | 180 | CAGGGCTTCG | 46 | 9782 | 9801 | 579 |
| | | | CGCAGAGCAC | | | | |
| 472161 | 162 | 181 | CCAGGGCTTC | 42 | 9783 | 9802 | 580 |
| | | | GCGCAGAGCA | | | | |
| 472162 | 164 | 183 | GGCCAGGGCT | 6 | 9785 | 9804 | 581 |
| | | | TCGCGCAGAG | | | | |
| 472163 | 253 | 272 | TGAGGGTCTT | 40 | 9874 | 9893 | 582 |
| | | | CATGGCTGAA | | | | |
| 472164 | 255 | 274 | TATGAGGGTC | 69 | 9876 | 9895 | 583 |
| | | | TTCATGGCTG | | | | |
| 472165 | 256 | 275 | CTATGAGGGT | 62 | 9877 | 9896 | 584 |
| | | | CTTCATGGCT | | | | |
| 472166 | 257 | 276 | GCTATGAGGG | 53 | 9878 | 9897 | 585 |
| | | | TCTTCATGGC | | | | |
| 472167 | 259 | 278 | CGGCTATGAG | 59 | 9880 | 9899 | 586 |
| | | | GGTCTTCATG | | | | |
| 472168 | 260 | 279 | GCGGCTATGA | 54 | 9881 | 9900 | 587 |
| | | | GGGTCTTCAT | | | | |
| 472169 | 261 | 280 | GGCGGCTATG | 57 | 9882 | 9901 | 588 |
| | | | AGGGTCTTCA | | | | |
| 472170 | 262 | 281 | AGGCGGCTAT | 69 | 9883 | 9902 | 589 |
| | | | GAGGGTCTTC | | | | |
| 472171 | 264 | 283 | GTAGGCGGCT | 32 | 9885 | 9904 | 590 |
| | | | ATGAGGGTCT | | | | |
| 472172 | 265 | 284 | AGTAGGCGGC | 23 | 9886 | 9905 | 591 |
| | | | TATGAGGGTC | | | | |
| 472173 | 267 | 286 | GGAGTAGGCG | 15 | 9888 | 9907 | 592 |
| | | | GCTATGAGGG | | | | |
| 472174 | 268 | 287 | CGGAGTAGGC | 48 | 9889 | 9908 | 593 |
| | | | GGCTATGAGG | | | | |
| 472175 | 270 | 289 | CCCGGAGTAG | 80 | 9891 | 9910 | 594 |
| | | | GCGGCTATGA | | | | |
| 472176 | 271 | 290 | CCCCGGAGTA | 75 | 9892 | 9911 | 595 |
| | | | GGCGGCTATG | | | | |
| 472177 | 273 | 292 | GACCCCGGAG | 69 | 9894 | 9913 | 596 |
| | | | TAGGCGGCTA | | | | |
| 472178 | 274 | 293 | GGACCCCGGA | 76 | 9895 | 9914 | 597 |
| | | | GTAGGCGGCT | | | | |
| 334177 | 275 | 294 | AGGACCCCGG | 74 | 9896 | 9915 | 145 |
| | | | AGTAGGCGGC | | | | |
| 472179 | 305 | 324 | CGGTCAGCCT | 30 | 9926 | 9945 | 598 |
| | | | CGGCCTGACG | | | | |
| 472180 | 306 | 325 | CCGGTCAGCC | 5 | 9927 | 9946 | 599 |
| | | | TCGGCCTGAC | | | | |
| 472181 | 308 | 327 | CTCCGGTCAG | 43 | 9929 | 9948 | 600 |
| | | | CCTCGGCCTG | | | | |
| 472182 | 309 | 328 | GCTCCGGTCA | 61 | 9930 | 9949 | 601 |
| | | | GCCTCGGCCT | | | | |
| 472183 | 311 | 330 | TGGCTCCGGT | 48 | 9932 | 9951 | 602 |
| | | | CAGCCTCGGC | | | | |
| 472184 | 312 | 331 | CTGGCTCCGG | 28 | 9933 | 9952 | 603 |
| | | | TCAGCCTCGG | | | | |
| 472185 | 313 | 332 | GCTGGCTCCG | 35 | 9934 | 9953 | 604 |
| | | | GTCAGCCTCG | | | | |
| 472186 | 314 | 333 | CGCTGGCTCC | 44 | 9935 | 9954 | 605 |
| | | | GGTCAGCCTC | | | | |
| 472187 | 315 | 334 | GCGCTGGCTC | 43 | 9936 | 9955 | 606 |
| | | | CGGTCAGCCT | | | | |
| 472188 | 332 | 351 | GCAGGTCCTC | 63 | 9953 | 9972 | 607 |
| | | | CGTGAGAGCG | | | | |
| 472189 | 333 | 352 | CGCAGGTCCT | 68 | 9954 | 9973 | 608 |
| | | | CCGTGAGAGC | | | | |
| 472190 | 334 | 353 | GCGCAGGTCC | 40 | 9955 | 9974 | 609 |
| | | | TCCGTGAGAG | | | | |
| 472191 | 335 | 354 | AGCGCAGGTC | 39 | 9956 | 9975 | 610 |
| | | | CTCCGTGAGA | | | | |
| 472192 | 336 | 355 | CAGCGCAGGT | 54 | 9957 | 9976 | 611 |
| | | | CCTCCGTGAG | | | | |
| 472193 | 337 | 356 | ACAGCGCAGG | 36 | 9958 | 9977 | 612 |
| | | | TCCTCCGTGA | | | | |
| 472194 | 338 | 357 | GACAGCGCAG | 63 | 9959 | 9978 | 613 |
| | | | GTCCTCCGTG | | | | |
| 472195 | 340 | 359 | GCGACAGCGC | 62 | 9961 | 9980 | 614 |
| | | | AGGTCCTCCG | | | | |
| 472196 | 341 | 360 | CGCGACAGCG | 65 | 9962 | 9981 | 615 |
| | | | CAGGTCCTCC | | | | |
| 472197 | 342 | 361 | GCGCGACAGC | 57 | 9963 | 9982 | 616 |
| | | | GCAGGTCCTC | | | | |
| 472198 | 343 | 362 | CGCGCGACAG | 58 | 9964 | 9983 | 617 |
| | | | CGCAGGTCCT | | | | |
| 472199 | 344 | 363 | TCGCGCGACA | 53 | 9965 | 9984 | 618 |
| | | | GCGCAGGTCC | | | | |
| 472200 | 345 | 364 | CTCGCGCGAC | 52 | 9966 | 9985 | 619 |
| | | | AGCGCAGGTC | | | | |
| 472201 | 346 | 365 | CCTCGCGCGA | 26 | 9967 | 9986 | 620 |
| | | | CAGCGCAGGT | | | | |
| 472202 | 347 | 366 | CCCTCGCGCG | 32 | 9968 | 9987 | 621 |
| | | | ACAGCGCAGG | | | | |
| 472203 | 349 | 368 | ACCCCTCGCG | 67 | 9970 | 9989 | 622 |
| | | | CGACAGCGCA | | | | |
| 472204 | 350 | 369 | GACCCCTCGC | 72 | 9971 | 9990 | 623 |
| | | | GCGACAGCGC | | | | |
| 472205 | 351 | 370 | AGACCCCTCG | 74 | 9972 | 9991 | 624 |
| | | | CGCGACAGCG | | | | |
| 472206 | 352 | 371 | CAGACCCCTC | 67 | 9973 | 9992 | 625 |
| | | | GCGCGACAGC | | | | |
| 472207 | 353 | 372 | CCAGACCCCT | 53 | 9974 | 9993 | 626 |
| | | | CGCGCGACAG | | | | |
| 472208 | 354 | 373 | CCCAGACCCC | 70 | 9975 | 9994 | 627 |
| | | | TCGCGCGACA | | | | |
| 472209 | 356 | 375 | CTCCCAGACC | 50 | 9977 | 9996 | 628 |
| | | | CCTCGCGCGA | | | | |
| 472210 | 357 | 376 | TCTCCCAGAC | 31 | 9978 | 9997 | 629 |
| | | | CCCTCGCGCG | | | | |
| 472211 | 358 | 377 | ATCTCCCAGA | 54 | 9979 | 9998 | 630 |
| | | | CCCCTCGCGC | | | | |
| 472212 | 359 | 378 | CATCTCCCAG | 51 | 9980 | 9999 | 631 |
| | | | ACCCCTCGCG | | | | |
| 472213 | 360 | 379 | CCATCTCCCA | 42 | 9981 | 10000 | 632 |
| | | | GACCCCTCGC | | | | |
| 472214 | 362 | 381 | CCCCATCTCC | 48 | 9983 | 10002 | 633 |
| | | | CAGACCCCTC | | | | |
| 472215 | 363 | 382 | GCCCCATCTC | 32 | n/a | n/a | 634 |
| | | | CCAGACCCCT | | | | |
| 472216 | 364 | 383 | TGCCCCATCT | 46 | n/a | n/a | 635 |
| | | | CCCAGACCCC | | | | |
| 472217 | 365 | 384 | GTGCCCCATC | 43 | n/a | n/a | 636 |
| | | | TCCCAGACCC | | | | |
| 472218 | 366 | 385 | AGTGCCCCAT | 19 | n/a | n/a | 637 |
| | | | CTCCCAGACC | | | | |
| 472219 | 368 | 387 | CCAGTGCCCC | 9 | n/a | n/a | 638 |
| | | | ATCTCCCAGA | | | | |
| 472220 | 369 | 388 | TCCAGTGCCC | 0 | n/a | n/a | 639 |
| | | | CATCTCCCAG | | | | |
| 472221 | 371 | 390 | GATCCAGTGC | 0 | n/a | n/a | 640 |
| | | | CCCATCTCCC | | | | |
| 472222 | 372 | 391 | GGATCCAGTG | 2 | n/a | n/a | 641 |
| | | | CCCCATCTCC | | | | |
| 472223 | 374 | 393 | CTGGATCCAG | 31 | n/a | n/a | 642 |
| | | | TGCCCCATCT | | | | |
| 472224 | 375 | 394 | GCTGGATCCA | 39 | n/a | n/a | 643 |
| | | | GTGCCCCATC | | | | |
| 472225 | 377 | 396 | ATGCTGGATC | 36 | n/a | n/a | 644 |
| | | | CAGTGCCCCA | | | | |
| 472226 | 378 | 397 | GATGCTGGAT | 18 | n/a | n/a | 645 |
| | | | CCAGTGCCCC | | | | |
| 472227 | 380 | 399 | AGGATGCTGG | 41 | 25506 | 25525 | 646 |
| | | | ATCCAGTGCC | | | | |
| 472228 | 381 | 400 | GAGGATGCTG | 17 | 25507 | 25526 | 647 |
| | | | GATCCAGTGC | | | | |
| 472229 | 383 | 402 | GAGAGGATGC | 6 | 25509 | 25528 | 648 |
| | | | TGGATCCAGT | | | | |

TABLE 12
Inhibition of DGAT2 mRNA by 5-10-5 MOE
gapmers targeting SEQ ID NOs: 1 and 2

| | SEQ | SEQ | | | SEQ | SEQ | |
|---|---|---|---|---|---|---|---|
| | ID | ID | | % | ID | ID | |
| | NO: | NO: | | in- | NO: | NO: | |
| | 1 | 1 | | hi- | 2 | 2 | SEQ |
| ISIS | Start | Stop | | bi- | Start | Stop | ID |
| NO | Site | Site | Sequence | tion | Site | Site | NO |
| 413433 | n/a | n/a | GCCTGGACAA | 75 | 32431 | 32450 | 425 |
| | | | GTCCTGCCCA | | | | |
| 472373 | 782 | 801 | ACTTCTGTGG | 31 | 37310 | 37329 | 649 |
| | | | CCTCTGTGCT | | | | |
| 472374 | 784 | 803 | TCACTTCTGT | 42 | 37312 | 37331 | 650 |
| | | | GGCCTCTGTG | | | | |
| 472375 | 785 | 804 | CTCACTTCTG | 53 | 37313 | 37332 | 651 |
| | | | TGGCCTCTGT | | | | |
| 472376 | 787 | 806 | TGCTCACTTC | 66 | 37315 | 37334 | 652 |
| | | | TGTGGCCTCT | | | | |
| 472377 | 788 | 807 | TTGCTCACTT | 78 | 37316 | 37335 | 653 |
| | | | CTGTGGCCTC | | | | |
| 472378 | 790 | 809 | TCTTGCTCAC | 57 | 37318 | 37337 | 654 |
| | | | TTCTGTGGCC | | | | |
| 472379 | 791 | 810 | TTCTTGCTCA | 43 | 37319 | 37338 | 655 |
| | | | CTTCTGTGGC | | | | |
| 472380 | 793 | 812 | ACTTCTTGCT | 41 | 37321 | 37340 | 656 |
| | | | CACTTCTGTG | | | | |
| 472381 | 794 | 813 | AACTTCTTGC | 14 | 37322 | 37341 | 657 |
| | | | TCACTTCTGT | | | | |
| 472382 | 796 | 815 | GGAACTTCTT | 39 | 37324 | 37343 | 658 |
| | | | GCTCACTTCT | | | | |
| 472383 | 797 | 816 | GGGAACTTCT | 47 | 37325 | 37344 | 659 |
| | | | TGCTCACTTC | | | | |
| 472384 | 799 | 818 | CTGGGAACTT | 65 | 37327 | 37346 | 660 |
| | | | CTTGCTCACT | | | | |
| 472385 | 800 | 819 | CCTGGGAACT | 0 | 37328 | 37347 | 661 |
| | | | TCTTGCTCAC | | | | |
| 472386 | 802 | 821 | TGCCTGGGAA | 54 | 37330 | 37349 | 662 |
| | | | CTTCTTGCTC | | | | |
| 472387 | 803 | 822 | ATGCCTGGGA | 24 | 37331 | 37350 | 663 |
| | | | ACTTCTTGCT | | | | |
| 472388 | 805 | 824 | GTATGCCTGG | 26 | 37333 | 37352 | 664 |
| | | | GAACTTCTTG | | | | |
| 472389 | 806 | 825 | CGTATGCCTG | 46 | 37334 | 37353 | 665 |
| | | | GGAACTTCTT | | | | |
| 472390 | 807 | 826 | CCGTATGCCT | 41 | 37335 | 37354 | 666 |
| | | | GGGAACTTCT | | | | |
| 472391 | 809 | 828 | GGCCGTATGC | 47 | 37337 | 37356 | 667 |
| | | | CTGGGAACTT | | | | |
| 472392 | 810 | 829 | AGGCCGTATG | 45 | 37338 | 37357 | 668 |
| | | | CCTGGGAACT | | | | |
| 472393 | 812 | 831 | TAAGGCCGTA | 38 | 37340 | 37359 | 669 |
| | | | TGCCTGGGAA | | | | |
| 472394 | 813 | 832 | GTAAGGCCGT | 53 | 37341 | 37360 | 670 |
| | | | ATGCCTGGGA | | | | |
| 472395 | 821 | 840 | GTAGCCAGGT | 53 | 37349 | 37368 | 671 |
| | | | AAGGCCGTAT | | | | |
| 472396 | 822 | 841 | TGTAGCCAGG | 41 | 37350 | 37369 | 672 |
| | | | TAAGGCCGTA | | | | |
| 472397 | 824 | 843 | AGTGTAGCCA | 36 | 37352 | 37371 | 673 |
| | | | GGTAAGGCCG | | | | |
| 472398 | 825 | 844 | CAGTGTAGCC | 63 | 37353 | 37372 | 674 |
| | | | AGGTAAGGCC | | | | |
| 472399 | 826 | 845 | CCAGTGTAGC | 45 | 37354 | 37373 | 675 |
| | | | CAGGTAAGGC | | | | |
| 472400 | 862 | 881 | GGTACTCCCT | 42 | 37390 | 37409 | 676 |
| | | | CAACACAGGC | | | | |
| 472401 | 863 | 882 | AGGTACTCCC | 11 | 37391 | 37410 | 677 |
| | | | TCAACACAGG | | | | |
| 472402 | 865 | 884 | TCAGGTACTC | 20 | 37393 | 37412 | 678 |
| | | | CCTCAACACA | | | | |
| 472403 | 866 | 885 | ATCAGGTACT | 13 | 37394 | 37413 | 679 |
| | | | CCCTCAACAC | | | | |
| 472404 | 868 | 887 | ACATCAGGTA | 11 | 37396 | 37415 | 680 |
| | | | CTCCCTCAAC | | | | |
| 472405 | 869 | 888 | GACATCAGGT | 27 | 37397 | 37416 | 681 |
| | | | ACTCCCTCAA | | | | |
| 472406 | 871 | 890 | CAGACATCAG | 39 | 37399 | 37418 | 682 |
| | | | GTACTCCCTC | | | | |
| 472407 | 872 | 891 | CCAGACATCA | 46 | 37400 | 37419 | 683 |
| | | | GGTACTCCCT | | | | |
| 472408 | 873 | 892 | TCCAGACATC | 32 | 37401 | 37420 | 684 |
| | | | AGGTACTCCC | | | | |
| 472409 | 874 | 893 | CTCCAGACAT | 29 | 37402 | 37421 | 685 |
| | | | CAGGTACTCC | | | | |
| 472410 | 879 | 898 | GATACCTCCA | 33 | n/a | n/a | 686 |
| | | | GACATCAGGT | | | | |
| 472411 | 880 | 899 | AGATACCTCC | 17 | n/a | n/a | 687 |
| | | | AGACATCAGG | | | | |
| 472412 | 882 | 901 | GCAGATACCT | 9 | n/a | n/a | 688 |
| | | | CCAGACATCA | | | | |
| 472413 | 883 | 902 | GGCAGATACC | 44 | n/a | n/a | 689 |
| | | | TCCAGACATC | | | | |
| 472414 | 885 | 904 | AGGGCAGATA | 0 | n/a | n/a | 690 |
| | | | CCTCCAGACA | | | | |
| 472415 | 886 | 905 | CAGGGCAGAT | 16 | n/a | n/a | 691 |
| | | | ACCTCCAGAC | | | | |
| 472416 | 888 | 907 | GACAGGGCAG | 1 | n/a | n/a | 692 |
| | | | ATACCTCCAG | | | | |
| 472417 | 889 | 908 | TGACAGGGCA | 31 | n/a | n/a | 693 |
| | | | GATACCTCCA | | | | |
| 472418 | 911 | 930 | AAATAGTCTA | 25 | 38064 | 38083 | 694 |
| | | | TGGTGTCCCG | | | | |
| 472419 | 912 | 931 | CAAATAGTCT | 32 | 38065 | 38084 | 695 |
| | | | ATGGTGTCCC | | | | |
| 472420 | 914 | 933 | AGCAAATAGT | 54 | 38067 | 38086 | 696 |
| | | | CTATGGTGTC | | | | |
| 472421 | 915 | 934 | AAGCAAATAG | 22 | 38068 | 38087 | 697 |
| | | | TCTATGGTGT | | | | |
| 472422 | 917 | 936 | GAAAGCAAAT | 24 | 38070 | 38089 | 698 |
| | | | AGTCTATGGT | | | | |
| 472423 | 918 | 937 | TGAAAGCAAA | 19 | 38071 | 38090 | 699 |
| | | | TAGTCTATGG | | | | |
| 472424 | 920 | 939 | TTTGAAAGCA | 17 | 38073 | 38092 | 700 |
| | | | AATAGTCTAT | | | | |
| 472425 | 921 | 940 | CTTTGAAAGC | 0 | 38074 | 38093 | 701 |
| | | | AAATAGTCTA | | | | |
| 472426 | 923 | 942 | TTCTTTGAAA | 24 | 38076 | 38095 | 702 |
| | | | GCAAATAGTC | | | | |
| 472427 | 924 | 943 | ATTCTTTGAA | 9 | 38077 | 38096 | 703 |
| | | | AGCAAATAGT | | | | |
| 472428 | 926 | 945 | CCATTCTTTG | 31 | 38079 | 38098 | 704 |
| | | | AAAGCAAATA | | | | |
| 472429 | 927 | 946 | CCCATTCTTT | 48 | 38080 | 38099 | 705 |
| | | | GAAAGCAAAT | | | | |
| 380132 | 929 | 948 | CTCCCATTCT | 75 | 38082 | 38101 | 706 |
| | | | TTGAAAGCAA | | | | |
| 472430 | 930 | 949 | ACTCCCATTC | 35 | 38083 | 38102 | 707 |
| | | | TTTGAAAGCA | | | | |
| 472431 | 931 | 950 | CACTCCCATT | 35 | 38084 | 38103 | 708 |
| | | | CTTTGAAAGC | | | | |
| 472432 | 933 | 952 | GCCACTCCCA | 69 | 38086 | 38105 | 709 |
| | | | TTCTTTGAAA | | | | |
| 472433 | 934 | 953 | TGCCACTCCC | 73 | 38087 | 38106 | 710 |
| | | | ATTCTTTGAA | | | | |
| 217328 | 938 | 957 | GCATTGCCAC | 76 | 38091 | 38110 | 144 |
| | | | TCCCATTCTT | | | | |
| 472434 | 944 | 963 | ATGATAGCAT | 65 | 38097 | 38116 | 711 |
| | | | TGCCACTCCC | | | | |
| 472435 | 945 | 964 | GATGATAGCA | 50 | 38098 | 38117 | 712 |
| | | | TTGCCACTCC | | | | |
| 472436 | 946 | 965 | TGATGATAGC | 56 | 38099 | 38118 | 713 |
| | | | ATTGCCACTC | | | | |
| 380134 | 947 | 966 | ATGATGATAG | 34 | 38100 | 38119 | 714 |
| | | | CATTGCCACT | | | | |
| 472437 | 949 | 968 | CGATGATGAT | 56 | 38102 | 38121 | 715 |
| | | | AGCATTGCCA | | | | |
| 472438 | 950 | 969 | ACGATGATGA | 51 | 38103 | 38122 | 716 |
| | | | TAGCATTGCC | | | | |
| 472439 | 951 | 970 | CACGATGATG | 56 | 38104 | 38123 | 717 |
| | | | ATAGCATTGC | | | | |
| 472440 | 952 | 971 | CCACGATGAT | 63 | 38105 | 38124 | 718 |
| | | | GATAGCATTG | | | | |
| 472441 | 974 | 993 | AGAGACTCAG | 63 | 38127 | 38146 | 719 |
| | | | CCGCACCCCC | | | | |
| 472442 | 975 | 994 | CAGAGACTCA | 66 | 38128 | 38147 | 720 |
| | | | GCCGCACCCC | | | | |
| 366730 | 979 | 998 | AGCTCAGAGA | 67 | 38132 | 38151 | 150 |
| | | | CTCAGCCGCA | | | | |
| 423442 | 980 | 999 | GAGCTCAGAG | 52 | 38133 | 38152 | 489 |
| | | | ACTCAGCCGC | | | | |
| 423444 | 982 | 1001 | TGGAGCTCAG | 63 | 38135 | 38154 | 153 |
| | | | AGACTCAGCC | | | | |
| 472443 | 989 | 1008 | CCAGGCATGG | 47 | 38142 | 38161 | 721 |
| | | | AGCTCAGAGA | | | | |

TABLE 13
Inhibition of DGAT2 mRNA by 5-10-5 MOE
gapmers targeting SEQ ID NO: 1 and 2

| | SEQ | SEQ | | | SEQ | SEQ | |
|---|---|---|---|---|---|---|---|
| | ID | ID | | % | ID | ID | |
| | NO: | NO: | | in- | NO: | NO: | |
| | 1 | 1 | | hi- | 2 | 2 | SEQ |
| ISIS | Start | Stop | | bi- | Start | Stop | ID |
| NO | Site | Site | Sequence | tion | Site | Site | NO |
| 413433 | n/a | n/a | GCCTGGACAA | 94 | 32431 | 32450 | 425 |
| | | | GTCCTGCCCA | | | | |
| 472230 | 384 | 403 | GGAGAGGATG | 38 | 25510 | 25529 | 722 |
| | | | CTGGATCCAG | | | | |
| 472231 | 386 | 405 | GCGGAGAGGA | 41 | 25512 | 25531 | 723 |
| | | | TGCTGGATCC | | | | |
| 472232 | 387 | 406 | GGCGGAGAGG | 28 | 25513 | 25532 | 724 |
| | | | ATGCTGGATC | | | | |
| 472233 | 389 | 408 | AGGGCGGAGA | 0 | 25515 | 25534 | 725 |
| | | | GGATGCTGGA | | | | |
| 472234 | 390 | 409 | GAGGGCGGAG | 66 | 25516 | 25535 | 726 |
| | | | AGGATGCTGG | | | | |
| 472235 | 391 | 410 | GGAGGGCGGA | 28 | 25517 | 25536 | 727 |
| | | | GAGGATGCTG | | | | |
| 472236 | 392 | 411 | TGGAGGGCGG | 35 | 25518 | 25537 | 728 |
| | | | AGAGGATGCT | | | | |
| 472237 | 394 | 413 | CCTGGAGGGC | 9 | 25520 | 25539 | 729 |
| | | | GGAGAGGATG | | | | |
| 472238 | 395 | 414 | TCCTGGAGGG | 0 | 25521 | 25540 | 730 |
| | | | CGGAGAGGAT | | | | |
| 472239 | 397 | 416 | GGTCCTGGAG | 0 | 25523 | 25542 | 731 |
| | | | GGCGGAGAGG | | | | |
| 472240 | 398 | 417 | AGGTCCTGGA | 32 | 25524 | 25543 | 732 |
| | | | GGGCGGAGAG | | | | |
| 472241 | 399 | 418 | GAGGTCCTGG | 33 | 25525 | 25544 | 733 |
| | | | AGGGCGGAGA | | | | |
| 472242 | 400 | 419 | AGAGGTCCTG | 0 | 25526 | 25545 | 734 |
| | | | GAGGGCGGAG | | | | |
| 472243 | 401 | 420 | AAGAGGTCCT | 35 | 25527 | 25546 | 735 |
| | | | GGAGGGCGGA | | | | |
| 472244 | 402 | 421 | GAAGAGGTCC | 16 | 25528 | 25547 | 736 |
| | | | TGGAGGGCGG | | | | |
| 472245 | 403 | 422 | AGAAGAGGTC | 53 | 25529 | 25548 | 737 |
| | | | CTGGAGGGCG | | | | |
| 366710 | 425 | 444 | GACCTATTGA | 62 | 25551 | 25570 | 146 |
| | | | GCCAGGTGAC | | | | |
| 472246 | 426 | 445 | GGACCTATTG | 63 | 25552 | 25571 | 738 |
| | | | AGCCAGGTGA | | | | |
| 472247 | 427 | 446 | TGGACCTATT | 58 | 25553 | 25572 | 739 |
| | | | GAGCCAGGTG | | | | |
| 472248 | 428 | 447 | TTGGACCTAT | 71 | 25554 | 25573 | 740 |
| | | | TGAGCCAGGT | | | | |
| 472249 | 429 | 448 | CTTGGACCTA | 63 | 25555 | 25574 | 741 |
| | | | TTGAGCCAGG | | | | |
| 472250 | 431 | 450 | ACCTTGGACC | 80 | 25557 | 25576 | 742 |
| | | | TATTGAGCCA | | | | |
| 472251 | 432 | 451 | CACCTTGGAC | 70 | 25558 | 25577 | 743 |
| | | | CTATTGAGCC | | | | |
| 472252 | 433 | 452 | CCACCTTGGA | 74 | 25559 | 25578 | 744 |
| | | | CCTATTGAGC | | | | |
| 472253 | 434 | 453 | TCCACCTTGG | 68 | 25560 | 25579 | 745 |
| | | | ACCTATTGAG | | | | |
| 472254 | 436 | 455 | TTTCCACCTT | 41 | 25562 | 25581 | 746 |
| | | | GGACCTATTG | | | | |
| 472255 | 437 | 456 | TTTTCCACCT | 43 | 25563 | 25582 | 747 |
| | | | TGGACCTATT | | | | |
| 472256 | 438 | 457 | CTTTTCCACC | 48 | 25564 | 25583 | 748 |
| | | | TTGGACCTAT | | | | |
| 472257 | 439 | 458 | GCTTTTCCAC | 75 | 25565 | 25584 | 749 |
| | | | CTTGGACCTA | | | | |
| 472258 | 441 | 460 | CTGCTTTTCC | 83 | 25567 | 25586 | 750 |
| | | | ACCTTGGACC | | | | |
| 472259 | 442 | 461 | GCTGCTTTTC | 83 | 25568 | 25587 | 751 |
| | | | CACCTTGGAC | | | | |
| 472260 | 443 | 462 | AGCTGCTTTT | 84 | 25569 | 25588 | 152 |
| | | | CCACCTTGGA | | | | |
| 472261 | 444 | 463 | TAGCTGCTTT | 76 | 25570 | 25589 | 752 |
| | | | TCCACCTTGG | | | | |
| 366714 | 445 | 464 | GTAGCTGCTT | 70 | 25571 | 25590 | 147 |
| | | | TTCCACCTTG | | | | |
| 472262 | 446 | 465 | TGTAGCTGCT | 39 | 25572 | 25591 | 753 |
| | | | TTTCCACCTT | | | | |
| 472263 | 447 | 466 | CTGTAGCTGC | 72 | 25573 | 25592 | 754 |
| | | | TTTTCCACCT | | | | |
| 380086 | 449 | 468 | ACCTGTAGCT | 70 | 25575 | 25594 | 755 |
| | | | GCTTTTCCAC | | | | |
| 472264 | 450 | 469 | GACCTGTAGC | 77 | 25576 | 25595 | 756 |
| | | | TGCTTTTCCA | | | | |
| 472265 | 452 | 471 | ATGACCTGTA | 57 | 25578 | 25597 | 757 |
| | | | GCTGCTTTTC | | | | |
| 472266 | 453 | 472 | GATGACCTGT | 74 | 25579 | 25598 | 758 |
| | | | AGCTGCTTTT | | | | |
| 472267 | 454 | 473 | AGATGACCTG | 67 | 25580 | 25599 | 759 |
| | | | TAGCTGCTTT | | | | |
| 472268 | 456 | 475 | TGAGATGACC | 77 | 25582 | 25601 | 760 |
| | | | TGTAGCTGCT | | | | |
| 472269 | 457 | 476 | CTGAGATGAC | 78 | 25583 | 25602 | 761 |
| | | | CTGTAGCTGC | | | | |
| 472270 | 459 | 478 | CACTGAGATG | 80 | 25585 | 25604 | 762 |
| | | | ACCTGTAGCT | | | | |
| 472271 | 460 | 479 | GCACTGAGAT | 77 | 25586 | 25605 | 763 |
| | | | GACCTGTAGC | | | | |
| 472272 | 462 | 481 | GAGCACTGAG | 71 | 25588 | 25607 | 764 |
| | | | ATGACCTGTA | | | | |
| 472273 | 463 | 482 | GGAGCACTGA | 75 | 25589 | 25608 | 765 |
| | | | GATGACCTGT | | | | |
| 472274 | 465 | 484 | CTGGAGCACT | 72 | 25591 | 25610 | 766 |
| | | | GAGATGACCT | | | | |
| 472275 | 466 | 485 | ACTGGAGCAC | 62 | 25592 | 25611 | 767 |
| | | | TGAGATGACC | | | | |
| 423453 | 474 | 493 | CAGGACCCAC | 92 | 25600 | 25619 | 457 |
| | | | TGGAGCACTG | | | | |
| 472276 | 477 | 496 | GGACAGGACC | 72 | 25603 | 25622 | 768 |
| | | | CACTGGAGCA | | | | |
| 472277 | 478 | 497 | AGGACAGGAC | 74 | 25604 | 25623 | 769 |
| | | | CCACTGGAGC | | | | |
| 472278 | 480 | 499 | GAAGGACAGG | 53 | 25606 | 25625 | 770 |
| | | | ACCCACTGGA | | | | |
| 472279 | 481 | 500 | GGAAGGACAG | 48 | 25607 | 25626 | 771 |
| | | | GACCCACTGG | | | | |
| 472280 | 483 | 502 | AAGGAAGGAC | 54 | 25609 | 25628 | 772 |
| | | | AGGACCCACT | | | | |
| 472281 | 484 | 503 | CAAGGAAGGA | 40 | 25610 | 25629 | 773 |
| | | | CAGGACCCAC | | | | |
| 472282 | 485 | 504 | ACAAGGAAGG | 65 | 25611 | 25630 | 774 |
| | | | ACAGGACCCA | | | | |
| 472283 | 487 | 506 | GTACAAGGAA | 55 | 25613 | 25632 | 775 |
| | | | GGACAGGACC | | | | |
| 472284 | 488 | 507 | AGTACAAGGA | 35 | 25614 | 25633 | 776 |
| | | | AGGACAGGAC | | | | |
| 472285 | 489 | 508 | CAGTACAAGG | 40 | 25615 | 25634 | 777 |
| | | | AAGGACAGGA | | | | |
| 472286 | 490 | 509 | CCAGTACAAG | 32 | 25616 | 25635 | 778 |
| | | | GAAGGACAGG | | | | |
| 472287 | 492 | 511 | TCCCAGTACA | 58 | n/a | n/a | 779 |
| | | | AGGAAGGACA | | | | |
| 472288 | 493 | 512 | CTCCCAGTAC | 33 | n/a | n/a | 780 |
| | | | AAGGAAGGAC | | | | |
| 472289 | 495 | 514 | CACTCCCAGT | 47 | n/a | n/a | 781 |
| | | | ACAAGGAAGG | | | | |
| 472290 | 496 | 515 | CCACTCCCAG | 4 | n/a | n/a | 782 |
| | | | TACAAGGAAG | | | | |
| 472291 | 498 | 517 | GGCCACTCCC | 12 | n/a | n/a | 783 |
| | | | AGTACAAGGA | | | | |
| 472292 | 499 | 518 | AGGCCACTCC | 2 | n/a | n/a | 784 |
| | | | CAGTACAAGG | | | | |
| 472293 | 501 | 520 | GCAGGCCACT | 0 | n/a | n/a | 785 |
| | | | CCCAGTACAA | | | | |
| 472294 | 502 | 521 | TGCAGGCCAC | 0 | n/a | n/a | 786 |
| | | | TCCCAGTACA | | | | |
| 472295 | 504 | 523 | ACTGCAGGCC | 43 | n/a | n/a | 787 |
| | | | ACTCCCAGTA | | | | |
| 472296 | 505 | 524 | CACTGCAGGC | 14 | n/a | n/a | 788 |
| | | | CACTCCCAGT | | | | |
| 472297 | 507 | 526 | GGCACTGCAG | 73 | n/a | n/a | 789 |
| | | | GCCACTCCCA | | | | |
| 472298 | 508 | 527 | TGGCACTGCA | 25 | n/a | n/a | 790 |
| | | | GGCCACTCCC | | | | |
| 472299 | 509 | 528 | ATGGCACTGC | 46 | 31076 | 31095 | 791 |
| | | | AGGCCACTCC | | | | |
| 472300 | 511 | 530 | GGATGGCACT | 43 | 31078 | 31097 | 792 |
| | | | GCAGGCCACT | | | | |
| 472301 | 512 | 531 | AGGATGGCAC | 61 | 31079 | 31098 | 793 |
| | | | TGCAGGCCAC | | | | |
| 472302 | 513 | 532 | GAGGATGGCA | 69 | 31080 | 31099 | 794 |
| | | | CTGCAGGCCA | | | | |

TABLE 14
Inhibition of DGAT2 mRNA by 5-10-5 MOE
gapmers targeting SEQ ID NO: 1 and 2

| | SEQ | SEQ | | | SEQ | SEQ | |
|---|---|---|---|---|---|---|---|
| | ID | ID | | % | ID | ID | |
| | NO: | NO: | | in- | NO: | NO: | |
| | 1 | 1 | | hi- | 2 | 2 | SEQ |
| ISIS | Start | Stop | | bi- | Start | Stop | ID |
| NO | Site | Site | Sequence | tion | Site | Site | NO |
| 413433 | n/a | n/a | GCCTGGACAA | 90 | 32431 | 32450 | 425 |
| | | | GTCCTGCCCA | | | | |
| 472303 | 514 | 533 | TGAGGATGGC | 45 | 31081 | 31100 | 795 |
| | | | ACTGCAGGCC | | | | |
| 472304 | 516 | 535 | CATGAGGATG | 24 | 31083 | 31102 | 796 |
| | | | GCACTGCAGG | | | | |
| 472305 | 517 | 536 | ACATGAGGAT | 19 | 31084 | 31103 | 797 |
| | | | GGCACTGCAG | | | | |
| 472306 | 518 | 537 | TACATGAGGA | 59 | 31085 | 31104 | 798 |
| | | | TGGCACTGCA | | | | |
| 472307 | 521 | 540 | ATGTACATGA | 32 | 31088 | 31107 | 799 |
| | | | GGATGGCACT | | | | |
| 472308 | 522 | 541 | TATGTACATG | 22 | 31089 | 31108 | 800 |
| | | | AGGATGGCAC | | | | |
| 472309 | 523 | 542 | ATATGTACAT | 39 | 31090 | 31109 | 801 |
| | | | GAGGATGGCA | | | | |
| 472310 | 524 | 543 | AATATGTACA | 34 | 31091 | 31110 | 802 |
| | | | TGAGGATGGC | | | | |
| 472311 | 526 | 545 | AGAATATGTA | 1 | 31093 | 31112 | 803 |
| | | | CATGAGGATG | | | | |
| 472312 | 527 | 546 | CAGAATATGT | 48 | 31094 | 31113 | 804 |
| | | | ACATGAGGAT | | | | |
| 472313 | 528 | 547 | GCAGAATATG | 44 | 31095 | 31114 | 805 |
| | | | TACATGAGGA | | | | |
| 472314 | 529 | 548 | TGCAGAATAT | 43 | 31096 | 31115 | 806 |
| | | | GTACATGAGG | | | | |
| 366722 | 530 | 549 | GTGCAGAATA | 65 | 31097 | 31116 | 148 |
| | | | TGTACATGAG | | | | |
| 472315 | 552 | 571 | CACAGCGATG | 65 | 31119 | 31138 | 807 |
| | | | AGCCAGCAAT | | | | |
| 472316 | 553 | 572 | GCACAGCGAT | 84 | 31120 | 31139 | 808 |
| | | | GAGCCAGCAA | | | | |
| 472317 | 555 | 574 | GAGCACAGCG | 87 | 31122 | 31141 | 809 |
| | | | ATGAGCCAGC | | | | |
| 472318 | 556 | 575 | AGAGCACAGC | 83 | 31123 | 31142 | 810 |
| | | | GATGAGCCAG | | | | |
| 472319 | 558 | 577 | GTAGAGCACA | 73 | 31125 | 31144 | 811 |
| | | | GCGATGAGCC | | | | |
| 472320 | 559 | 578 | AGTAGAGCAC | 68 | 31126 | 31145 | 812 |
| | | | AGCGATGAGC | | | | |
| 472321 | 560 | 579 | AAGTAGAGCA | 48 | 31127 | 31146 | 813 |
| | | | CAGCGATGAG | | | | |
| 472322 | 561 | 580 | GAAGTAGAGC | 22 | 31128 | 31147 | 814 |
| | | | ACAGCGATGA | | | | |
| 472323 | 563 | 582 | GTGAAGTAGA | 64 | 31130 | 31149 | 815 |
| | | | GCACAGCGAT | | | | |
| 472324 | 564 | 583 | AGTGAAGTAG | 51 | 31131 | 31150 | 816 |
| | | | AGCACAGCGA | | | | |
| 472325 | 565 | 584 | AAGTGAAGTA | 39 | 31132 | 31151 | 817 |
| | | | GAGCACAGCG | | | | |
| 472326 | 566 | 585 | CAAGTGAAGT | 26 | 31133 | 31152 | 818 |
| | | | AGAGCACAGC | | | | |
| 472327 | 568 | 587 | GCCAAGTGAA | 64 | 31135 | 31154 | 819 |
| | | | GTAGAGCACA | | | | |
| 472328 | 569 | 588 | AGCCAAGTGA | 65 | 31136 | 31155 | 820 |
| | | | AGTAGAGCAC | | | | |
| 472329 | 571 | 590 | CCAGCCAAGT | 51 | 31138 | 31157 | 821 |
| | | | GAAGTAGAGC | | | | |
| 472330 | 572 | 591 | ACCAGCCAAG | 47 | 31139 | 31158 | 822 |
| | | | TGAAGTAGAG | | | | |
| 472331 | 574 | 593 | ACACCAGCCA | 35 | 31141 | 31160 | 823 |
| | | | AGTGAAGTAG | | | | |
| 472332 | 575 | 594 | AACACCAGCC | 34 | 31142 | 31161 | 824 |
| | | | AAGTGAAGTA | | | | |
| 472333 | 577 | 596 | CAAACACCAG | 33 | 31144 | 31163 | 825 |
| | | | CCAAGTGAAG | | | | |
| 472334 | 578 | 597 | TCAAACACCA | 34 | 31145 | 31164 | 826 |
| | | | GCCAAGTGAA | | | | |
| 472335 | 580 | 599 | AGTCAAACAC | 39 | 31147 | 31166 | 827 |
| | | | CAGCCAAGTG | | | | |
| 472336 | 581 | 600 | CAGTCAAACA | 37 | 31148 | 31167 | 828 |
| | | | CCAGCCAAGT | | | | |
| 472337 | 583 | 602 | TCCAGTCAAA | 53 | 31150 | 31169 | 829 |
| | | | CACCAGCCAA | | | | |
| 472338 | 584 | 603 | TTCCAGTCAA | 52 | 31151 | 31170 | 830 |
| | | | ACACCAGCCA | | | | |
| 472339 | 586 | 605 | TGTTCCAGTC | 38 | 31153 | 31172 | 831 |
| | | | AAACACCAGC | | | | |
| 472340 | 587 | 606 | GTGTTCCAGT | 43 | 31154 | 31173 | 832 |
| | | | CAAACACCAG | | | | |
| 472341 | 589 | 608 | GTGTGTTCCA | 26 | 31156 | 31175 | 833 |
| | | | GTCAAACACC | | | | |
| 472342 | 590 | 609 | GGTGTGTTCC | 41 | 31157 | 31176 | 834 |
| | | | AGTCAAACAC | | | | |
| 472343 | 592 | 611 | TGGGTGTGTT | 7 | 31159 | 31178 | 835 |
| | | | CCAGTCAAAC | | | | |
| 472344 | 593 | 612 | TTGGGTGTGT | 15 | 31160 | 31179 | 836 |
| | | | TCCAGTCAAA | | | | |
| 472345 | 595 | 614 | TCTTGGGTGT | 54 | 31162 | 31181 | 837 |
| | | | GTTCCAGTCA | | | | |
| 472346 | 596 | 615 | TTCTTGGGTG | 47 | 31163 | 31182 | 838 |
| | | | TGTTCCAGTC | | | | |
| 472347 | 616 | 635 | ACTGTGACCT | 66 | 31548 | 31567 | 839 |
| | | | CCTGCCACCT | | | | |
| 472348 | 617 | 636 | CACTGTGACC | 55 | 31549 | 31568 | 840 |
| | | | TCCTGCCACC | | | | |
| 472349 | 619 | 638 | CCCACTGTGA | 79 | 31551 | 31570 | 841 |
| | | | CCTCCTGCCA | | | | |
| 472350 | 620 | 639 | ACCCACTGTG | 77 | 31552 | 31571 | 842 |
| | | | ACCTCCTGCC | | | | |
| 472351 | 622 | 641 | GGACCCACTG | 80 | 31554 | 31573 | 843 |
| | | | TGACCTCCTG | | | | |
| 472352 | 623 | 642 | CGGACCCACT | 63 | 31555 | 31574 | 844 |
| | | | GTGACCTCCT | | | | |
| 472353 | 624 | 643 | TCGGACCCAC | 82 | 31556 | 31575 | 845 |
| | | | TGTGACCTCC | | | | |
| 423459 | 631 | 650 | CCCAGTTTCG | 49 | 31563 | 31582 | 463 |
| | | | GACCCACTGT | | | | |
| 472354 | 633 | 652 | AGCCCAGTTT | 79 | 31565 | 31584 | 846 |
| | | | CGGACCCACT | | | | |
| 472355 | 634 | 653 | CAGCCCAGTT | 48 | 31566 | 31585 | 847 |
| | | | TCGGACCCAC | | | | |
| 472356 | 636 | 655 | CACAGCCCAG | 72 | 31568 | 31587 | 848 |
| | | | TTTCGGACCC | | | | |
| 472357 | 637 | 656 | ACACAGCCCA | 63 | 31569 | 31588 | 849 |
| | | | GTTTCGGACC | | | | |
| 472358 | 639 | 658 | CCACACAGCC | 75 | 31571 | 31590 | 850 |
| | | | CAGTTTCGGA | | | | |
| 472359 | 640 | 659 | GCCACACAGC | 74 | 31572 | 31591 | 851 |
| | | | CCAGTTTCGG | | | | |
| 472360 | 641 | 660 | CGCCACACAG | 77 | 31573 | 31592 | 852 |
| | | | CCCAGTTTCG | | | | |
| 472361 | 659 | 678 | AAGTAGTCTC | 7 | 31591 | 31610 | 853 |
| | | | GAAAGTAGCG | | | | |
| 472362 | 660 | 679 | AAAGTAGTCT | 0 | 31592 | 31611 | 854 |
| | | | CGAAAGTAGC | | | | |
| 472363 | 662 | 681 | GGAAAGTAGT | 15 | 31594 | 31613 | 855 |
| | | | CTCGAAAGTA | | | | |
| 472364 | 663 | 682 | GGGAAAGTAG | 0 | 31595 | 31614 | 856 |
| | | | TCTCGAAAGT | | | | |
| 472365 | 664 | 683 | TGGGAAAGTA | 57 | 31596 | 31615 | 857 |
| | | | GTCTCGAAAG | | | | |
| 472366 | 666 | 685 | GATGGGAAAG | 17 | 31598 | 31617 | 858 |
| | | | TAGTCTCGAA | | | | |
| 472367 | 667 | 686 | GGATGGGAAA | 21 | 31599 | 31618 | 859 |
| | | | GTAGTCTCGA | | | | |
| 411897 | 685 | 704 | TGTGTGTCTT | 41 | n/a | n/a | 60 |
| | | | CACCAGCTGG | | | | |
| 217317 | 693 | 712 | CAGCAGGTTG | 57 | 37221 | 37240 | 21 |
| | | | TGTGTCTTCA | | | | |
| 411901 | 695 | 714 | GTCAGCAGGT | 45 | 37223 | 37242 | 64 |
| | | | TGTGTGTCTT | | | | |
| 411902 | 697 | 716 | TGGTCAGCAG | 28 | 37225 | 37244 | 65 |
| | | | GTTGTGTGTC | | | | |
| 472368 | 724 | 743 | GGTGGTATCC | 50 | 37252 | 37271 | 860 |
| | | | AAAGATATAG | | | | |
| 472369 | 725 | 744 | GGGTGGTATC | 27 | 37253 | 37272 | 861 |
| | | | CAAAGATATA | | | | |
| 366728 | 757 | 776 | TGCAGAAGGC | 63 | 37285 | 37304 | 149 |
| | | | ACCCAGGCCC | | | | |
| 472370 | 758 | 777 | TTGCAGAAGG | 31 | 37286 | 37305 | 862 |
| | | | CACCCAGGCC | | | | |
| 472371 | 759 | 778 | GTTGCAGAAG | 46 | 37287 | 37306 | 863 |
| | | | GCACCCAGGC | | | | |
| 472372 | 781 | 800 | CTTCTGTGGC | 33 | 37309 | 37328 | 864 |
| | | | CTCTGTGCTG | | | | |

TABLE 15
Inhibition of DGAT2 mRNA by 5-10-5 MOE
gapmers targeting SEQ ID NO: 1 and 2

| | SEQ | SEQ | | | SEQ | SEQ | |
|---|---|---|---|---|---|---|---|
| | ID | ID | | % | ID | ID | |
| | NO: | NO: | | in- | NO: | NO: | |
| | 1 | 1 | | hi- | 2 | 2 | SEQ |
| ISIS | Start | Stop | | bi- | Start | Stop | ID |
| NO | Site | Site | Sequence | tion | Site | Site | NO |
| 413433 | n/a | n/a | GCCTGGACAA | 89 | 32431 | 32450 | 425 |
| | | | GTCCTGCCCA | | | | |
| 472521 | 1210 | 1229 | TGTCGGAGGA | 32 | 39257 | 39276 | 865 |
| | | | GAAGAGGCCT | | | | |
| 472522 | 1212 | 1231 | GGTGTCGGAG | 0 | 39259 | 39278 | 866 |
| | | | GAGAAGAGGC | | | | |
| 472523 | 1213 | 1232 | AGGTGTCGGA | 0 | 39260 | 39279 | 867 |
| | | | GGAGAAGAGG | | | | |
| 472524 | 1214 | 1233 | CAGGTGTCGG | 9 | 39261 | 39280 | 868 |
| | | | AGGAGAAGAG | | | | |
| 472525 | 1216 | 1235 | CCCAGGTGTC | 3 | 39263 | 39282 | 869 |
| | | | GGAGGAGAAG | | | | |
| 472526 | 1217 | 1236 | CCCCAGGTGT | 36 | 39264 | 39283 | 870 |
| | | | CGGAGGAGAA | | | | |
| 472527 | 1219 | 1238 | GCCCCCAGGT | 10 | 39266 | 39285 | 871 |
| | | | GTCGGAGGAG | | | | |
| 472528 | 1220 | 1239 | AGCCCCCAGG | 13 | 39267 | 39286 | 872 |
| | | | TGTCGGAGGA | | | | |
| 472529 | 1221 | 1240 | CAGCCCCCAG | 32 | 39268 | 39287 | 873 |
| | | | GTGTCGGAGG | | | | |
| 472530 | 1223 | 1242 | ACCAGCCCCC | 40 | 39270 | 39289 | 874 |
| | | | AGGTGTCGGA | | | | |
| 472531 | 1251 | 1270 | AACAGTGGTG | 17 | 39298 | 39317 | 875 |
| | | | ATGGGCTTGG | | | | |
| 472532 | 1252 | 1271 | CAACAGTGGT | 28 | 39299 | 39318 | 876 |
| | | | GATGGGCTTG | | | | |
| 472533 | 1323 | 1342 | CATGGTGTGG | 42 | 41294 | 41313 | 877 |
| | | | TACAGGTCGA | | | | |
| 472534 | 1324 | 1343 | ACATGGTGTG | 63 | 41295 | 41314 | 878 |
| | | | GTACAGGTCG | | | | |
| 411878 | 1325 | 1344 | TACATGGTGT | 63 | 41296 | 41315 | 879 |
| | | | GGTACAGGTC | | | | |
| 472535 | 1326 | 1345 | GTACATGGTG | 70 | 41297 | 41316 | 880 |
| | | | TGGTACAGGT | | | | |
| 472536 | 1328 | 1347 | ATGTACATGG | 56 | 41299 | 41318 | 881 |
| | | | TGTGGTACAG | | | | |
| 472537 | 1329 | 1348 | CATGTACATG | 50 | 41300 | 41319 | 882 |
| | | | GTGTGGTACA | | | | |
| 472538 | 1331 | 1350 | TCCATGTACA | 53 | 41302 | 41321 | 883 |
| | | | TGGTGTGGTA | | | | |
| 472539 | 1332 | 1351 | CTCCATGTAC | 68 | 41303 | 41322 | 884 |
| | | | ATGGTGTGGT | | | | |
| 472540 | 1333 | 1352 | CCTCCATGTA | 63 | 41304 | 41323 | 885 |
| | | | CATGGTGTGG | | | | |
| 472541 | 1335 | 1354 | GGCCTCCATG | 48 | 41306 | 41325 | 886 |
| | | | TACATGGTGT | | | | |
| 472542 | 1336 | 1355 | GGGCCTCCAT | 51 | 41307 | 41326 | 887 |
| | | | GTACATGGTG | | | | |
| 472543 | 1337 | 1356 | AGGGCCTCCA | 56 | 41308 | 41327 | 888 |
| | | | TGTACATGGT | | | | |
| 369255 | 1339 | 1358 | CCAGGGCCTC | 35 | 41310 | 41329 | 103 |
| | | | CATGTACATG | | | | |
| 411944 | 1340 | 1359 | ACCAGGGCCT | 47 | 41311 | 41330 | 120 |
| | | | CCATGTACAT | | | | |
| 411947 | 1344 | 1363 | CTTCACCAGG | 22 | 41315 | 41334 | 123 |
| | | | GCCTCCATGT | | | | |
| 411948 | 1345 | 1364 | GCTTCACCAG | 43 | 41316 | 41335 | 124 |
| | | | GGCCTCCATG | | | | |
| 411950 | 1347 | 1366 | GAGCTTCACC | 47 | 41318 | 41337 | 126 |
| | | | AGGGCCTCCA | | | | |
| 411951 | 1349 | 1368 | AAGAGCTTCA | 51 | 41320 | 41339 | 127 |
| | | | CCAGGGCCTC | | | | |
| 472544 | 1352 | 1371 | TCGAAGAGCT | 60 | 41323 | 41342 | 889 |
| | | | TCACCAGGGC | | | | |
| 472545 | 1353 | 1372 | GTCGAAGAGC | 73 | 41324 | 41343 | 890 |
| | | | TTCACCAGGG | | | | |
| 472546 | 1355 | 1374 | TTGTCGAAGA | 45 | 41326 | 41345 | 891 |
| | | | GCTTCACCAG | | | | |
| 472547 | 1356 | 1375 | CTTGTCGAAG | 65 | 41327 | 41346 | 892 |
| | | | AGCTTCACCA | | | | |
| 472548 | 1357 | 1376 | GCTTGTCGAA | 86 | 41328 | 41347 | 893 |
| | | | GAGCTTCACC | | | | |
| 472549 | 1358 | 1377 | TGCTTGTCGA | 68 | 41329 | 41348 | 894 |
| | | | AGAGCTTCAC | | | | |
| 472550 | 1360 | 1379 | TGTGCTTGTC | 70 | 41331 | 41350 | 895 |
| | | | GAAGAGCTTC | | | | |
| 472551 | 1361 | 1380 | TTGTGCTTGT | 40 | 41332 | 41351 | 896 |
| | | | CGAAGAGCTT | | | | |
| 472552 | 1362 | 1381 | CTTGTGCTTG | 77 | 41333 | 41352 | 897 |
| | | | TCGAAGAGCT | | | | |
| 366746 | 1366 | 1385 | TGGTCTTGTG | 37 | 41337 | 41356 | 151 |
| | | | CTTGTCGAAG | | | | |
| 472553 | 1368 | 1387 | CTTGGTCTTG | 58 | 41339 | 41358 | 898 |
| | | | TGCTTGTCGA | | | | |
| 472554 | 1369 | 1388 | ACTTGGTCTT | 60 | 41340 | 41359 | 899 |
| | | | GTGCTTGTCG | | | | |
| 472555 | 1370 | 1389 | AACTTGGTCT | 61 | 41341 | 41360 | 900 |
| | | | TGTGCTTGTC | | | | |
| 472556 | 1372 | 1391 | CGAACTTGGT | 55 | 41343 | 41362 | 901 |
| | | | CTTGTGCTTG | | | | |
| 472557 | 1373 | 1392 | CCGAACTTGG | 63 | 41344 | 41363 | 902 |
| | | | TCTTGTGCTT | | | | |
| 472558 | 1374 | 1393 | GCCGAACTTG | 59 | 41345 | 41364 | 903 |
| | | | GTCTTGTGCT | | | | |
| 472559 | 1375 | 1394 | GGCCGAACTT | 60 | 41346 | 41365 | 904 |
| | | | GGTCTTGTGC | | | | |
| 472560 | 1377 | 1396 | GAGGCCGAAC | 53 | 41348 | 41367 | 905 |
| | | | TTGGTCTTGT | | | | |
| 472561 | 1378 | 1397 | GGAGGCCGAA | 35 | 41349 | 41368 | 906 |
| | | | CTTGGTCTTG | | | | |
| 472562 | 1400 | 1419 | ACCTCCAGGA | 66 | 41371 | 41390 | 907 |
| | | | CCTCAGTCTC | | | | |
| 472563 | 1401 | 1420 | CACCTCCAGG | 19 | 41372 | 41391 | 908 |
| | | | ACCTCAGTCT | | | | |
| 472564 | 1402 | 1421 | TCACCTCCAG | 40 | 41373 | 41392 | 909 |
| | | | GACCTCAGTC | | | | |
| 472565 | 1404 | 1423 | GTTCACCTCC | 60 | 41375 | 41394 | 910 |
| | | | AGGACCTCAG | | | | |
| 472566 | 1405 | 1424 | AGTTCACCTC | 23 | 41376 | 41395 | 911 |
| | | | CAGGACCTCA | | | | |
| 472567 | 1406 | 1425 | CAGTTCACCT | 13 | 41377 | 41396 | 912 |
| | | | CCAGGACCTC | | | | |
| 472568 | 1408 | 1427 | CTCAGTTCAC | 67 | 41379 | 41398 | 913 |
| | | | CTCCAGGACC | | | | |
| 472569 | 1409 | 1428 | GCTCAGTTCA | 71 | 41380 | 41399 | 914 |
| | | | CCTCCAGGAC | | | | |
| 472570 | 1410 | 1429 | GGCTCAGTTC | 84 | 41381 | 41400 | 915 |
| | | | ACCTCCAGGA | | | | |
| 472571 | 1411 | 1430 | TGGCTCAGTT | 74 | 41382 | 41401 | 916 |
| | | | CACCTCCAGG | | | | |
| 411955 | 1502 | 1521 | AAATAACCCA | 81 | 41473 | 41492 | 131 |
| | | | CAGACACCCA | | | | |
| 411958 | 1506 | 1525 | TTTTAAATAA | 68 | 41477 | 41496 | 134 |
| | | | CCCACAGACA | | | | |
| 472572 | 1538 | 1557 | TTGTAATGGT | 7 | 41509 | 41528 | 917 |
| | | | TTAGCAAAAT | | | | |
| 472573 | 1539 | 1558 | ATTGTAATGG | 47 | 41510 | 41529 | 918 |
| | | | TTTAGCAAAA | | | | |
| 472574 | 1540 | 1559 | CATTGTAATG | 18 | 41511 | 41530 | 919 |
| | | | GTTTAGCAAA | | | | |
| 472575 | 1541 | 1560 | ACATTGTAAT | 40 | 41512 | 41531 | 920 |
| | | | GGTTTAGCAA | | | | |
| 472576 | 1543 | 1562 | TAACATTGTA | 58 | 41514 | 41533 | 921 |
| | | | ATGGTTTAGC | | | | |
| 472577 | 1544 | 1563 | CTAACATTGT | 49 | 41515 | 41534 | 922 |
| | | | AATGGTTTAG | | | | |
| 472578 | 1545 | 1564 | CCTAACATTG | 67 | 41516 | 41535 | 923 |
| | | | TAATGGTTTA | | | | |
| 472579 | 1546 | 1565 | ACCTAACATT | 27 | 41517 | 41536 | 924 |
| | | | GTAATGGTTT | | | | |
| 472580 | 1548 | 1567 | AGACCTAACA | 54 | 41519 | 41538 | 925 |
| | | | TTGTAATGGT | | | | |
| 472581 | 1549 | 1568 | AAGACCTAAC | 46 | 41520 | 41539 | 926 |
| | | | ATTGTAATGG | | | | |
| 472582 | 1550 | 1569 | AAAGACCTAA | 34 | 41521 | 41540 | 927 |
| | | | CATTGTAATG | | | | |
| 472583 | 1551 | 1570 | AAAAGACCTA | 33 | 41522 | 41541 | 928 |
| | | | ACATTGTAAT | | | | |
| 472584 | 1553 | 1572 | AAAAAAGACC | 53 | 41524 | 41543 | 929 |
| | | | TAACATTGTA | | | | |
| 472585 | 1554 | 1573 | TAAAAAAGAC | 58 | 41525 | 41544 | 930 |
| | | | CTAACATTGT | | | | |
| 472586 | 1556 | 1575 | CTTAAAAAAG | 25 | 41527 | 41546 | 931 |
| | | | ACCTAACATT | | | | |
| 472587 | 1557 | 1576 | TCTTAAAAAA | 23 | 41528 | 41547 | 932 |
| | | | GACCTAACAT | | | | |

### Example 4: Antisense Inhibition of Human DGAT2 in HepG2 Cells by MOE Gapmers

[0457] Antisense oligonucleotides were designed targeting a DGAT2 nucleic acid and were tested for their effects on DGAT2 mRNA in vitro. The antisense oligonucleotides were tested in a series of experiments that had similar culture conditions. ISIS 413433, which consistently demonstrated higher potency than any of the previously disclosed oligonucleotides in the studies above was included in this study as a benchmark oligonucleotide. Antisense oligonucleotides that demonstrated about the same or greater potency than ISIS 413433 were therefore considered for further experimentation.

[0458] The results for each experiment are presented in separate tables shown below. Cultured HepG2 cells at a density of 20,000 cells per well were transfected using electroporation with 4,500 nM antisense oligonucleotide. After a treatment period of approximately 24 hours, RNA was isolated from the cells and DGAT2 mRNA levels were measured by quantitative real-time PCR. Human primer probe set RTS2988 MGB was used to measure mRNA levels. The potency of some oligonucleotides was measured with human primer probe set RTS2367 (forward sequence GGCCTCCCGGAGACTGA, designated herein as SEQ ID NO: 4; reverse sequence AAGTGATTTGCAGCTGGTTCCT, designated herein as SEQ ID NO: 5; probe sequence AGGTGAACTGAGCCAGCCTTCGGG, designated herein as SEQ ID NO: 6). DGAT2 mRNA levels were adjusted according to total RNA content, as measured by RIBOGREEN®. Results are presented as percent inhibition of DGAT2, relative to untreated control cells. The results show several antisense oligonucleotides demonstrate greater potency than the benchmark oligonucleotides.

[0459] The newly designed chimeric antisense oligonucleotides in the Tables below were designed as 5-10-5 MOE gapmers or 3-10-4 MOE gapmers. The 5-10-5 MOE gapmers are 20 nucleosides in length, wherein the central gap segment comprises of ten 2′-deoxynucleosides and is flanked by wing segments on the 5′ direction and the 3′ direction comprising five nucleosides each. The 3-10-4 MOE gapmers are 17 nucleosides in length, wherein the central gap segment comprises of ten 2′-deoxynucleosides and is flanked by wing segments on the 5′ direction and the 3′ direction comprising three and four nucleosides respectively. Each nucleoside in the 5′ wing segment and each nucleoside in the 3′ wing segment has a 2′-MOE modification. The internucleoside linkages throughout each gapmer are phosphorothioate (P═S) linkages. All cytosine residues throughout each gapmer are 5-methylcytosines. “Start site” indicates the 5′-most nucleoside to which the gapmer is targeted in the human gene sequence. “Stop site” indicates the 3′-most nucleoside to which the gapmer is targeted human gene sequence. Each gapmer listed in the Tables below is targeted to SEQ ID NO: 1, SEQ ID NO: 2, or both. ‘n/a’ indicates that the antisense oligonucleotide does not target that particular gene sequence with 100% complementarity. In case the sequence alignment for a target gene in a particular table is not shown, it is understood that none of the oligonucleotides presented in that table align with 100% complementarity with that target gene.

TABLE 16
Inhibition of DGAT2 mRNA by 5-10-5 MOE
gapmers targeting SEQ ID NO: 2

| | SEQ | SEQ | | SEQ | SEQ | | |
|---|---|---|---|---|---|---|---|
| | ID | ID | | ID | ID | % | |
| | NO: | NO: | | NO: | NO: | in- | |
| | 1 | 1 | | 2 | 2 | hi- | SEQ |
| ISIS | Start | Stop | | Start | Stop | bi- | ID |
| NO | Site | Site | Sequence | Site | Site | tion | NO |
| 483799 | 221 | 240 | ACGGCCCCGC | 9842 | 9861 | 8 | 569 |
| | | | GGGAAGCCGC | | | | |
| 483800 | 226 | 245 | CAGTCACGGC | 9847 | 9866 | 46 | 570 |
| | | | CCCGCGGGAA | | | | |
| 483801 | 231 | 250 | CCGCCCAGTC | 9852 | 9871 | 0 | 571 |
| | | | ACGGCCCCGC | | | | |
| 483802 | 236 | 255 | GAAGCCCGCC | 9857 | 9876 | 50 | 572 |
| | | | CAGTCACGGC | | | | |
| 413433 | n/a | n/a | GCCTGGACAA | 32431 | 32450 | 85 | 425 |
| | | | GTCCTGCCCA | | | | |
| 483803 | n/a | n/a | ACCCCATCTC | 9984 | 10003 | 75 | 496 |
| | | | CCAGACCCCT | | | | |
| 483804 | n/a | n/a | CACTCACCCC | 9989 | 10008 | 46 | 497 |
| | | | ATCTCCCAGA | | | | |
| 483805 | n/a | n/a | CAGGTCCATA | 10014 | 10033 | 51 | 498 |
| | | | ACCCCTGCGC | | | | |
| 483806 | n/a | n/a | TCTCGCAGGT | 10019 | 10038 | 6 | 499 |
| | | | CCATAACCCC | | | | |
| 483807 | n/a | n/a | AATCTTCTCG | 10024 | 10043 | 50 | 500 |
| | | | CAGGTCCATA | | | | |
| 483808 | n/a | n/a | CAGAAAATCT | 10029 | 10048 | 49 | 501 |
| | | | TCTCGCAGGT | | | | |
| 483809 | n/a | n/a | CTTTCCAGAA | 10034 | 10053 | 37 | 502 |
| | | | AATCTTCTCG | | | | |
| 483810 | n/a | n/a | GGGCCCTTTC | 10039 | 10058 | 40 | 503 |
| | | | CAGAAAATCT | | | | |
| 483811 | n/a | n/a | CCACAGGGCC | 10044 | 10063 | 85 | 504 |
| | | | CTTTCCAGAA | | | | |
| 483812 | n/a | n/a | GCCTGCCACA | 10049 | 10068 | 76 | 505 |
| | | | GGGCCCTTTC | | | | |
| 483813 | n/a | n/a | CACCAGCCTG | 10054 | 10073 | 80 | 506 |
| | | | CCACAGGGCC | | | | |
| 483814 | n/a | n/a | CACGGATGAG | 10160 | 10179 | 73 | 507 |
| | | | GGAAACAAGC | | | | |
| 483815 | n/a | n/a | AATATCCCTA | 10205 | 10224 | 35 | 508 |
| | | | ATAACTAAGA | | | | |
| 483816 | n/a | n/a | TCTCGAATAT | 10210 | 10229 | 84 | 509 |
| | | | CCCTAATAAC | | | | |
| 483817 | n/a | n/a | GGAGTTCTCG | 10215 | 10234 | 96 | 510 |
| | | | AATATCCCTA | | | | |
| 483818 | n/a | n/a | AAACCCATAC | 10327 | 10346 | 76 | 511 |
| | | | CATCCTGCCC | | | | |
| 483819 | n/a | n/a | TGGTGGCTGT | 10351 | 10370 | 49 | 512 |
| | | | CTCAGGAGAC | | | | |
| 483820 | n/a | n/a | CCGTCTGGTG | 10356 | 10375 | 36 | 513 |
| | | | GCTGTCTCAG | | | | |
| 483821 | n/a | n/a | GGCAGACACA | 10389 | 10408 | 64 | 514 |
| | | | CCTGTTCCAG | | | | |
| 483822 | n/a | n/a | GACAGGGCAG | 10394 | 10413 | 64 | 515 |
| | | | ACACACCTGT | | | | |
| 483823 | n/a | n/a | CAGAGGACAG | 10399 | 10418 | 69 | 516 |
| | | | GGCAGACACA | | | | |
| 483824 | n/a | n/a | CCAGAGCCTG | 10430 | 10449 | 45 | 517 |
| | | | GGCGAGAGGA | | | | |
| 483825 | n/a | n/a | CAGGGTCCTC | 10490 | 10509 | 91 | 518 |
| | | | TCCGCTGCCT | | | | |
| 483826 | n/a | n/a | CTGAGGACCT | 10522 | 10541 | 83 | 519 |
| | | | CAGTTCTACC | | | | |
| 483827 | n/a | n/a | ATTCACTGAG | 10527 | 10546 | 67 | 520 |
| | | | GACCTCAGTT | | | | |
| 483828 | n/a | n/a | GCGCGATTCA | 10532 | 10551 | 88 | 521 |
| | | | CTGAGGACCT | | | | |
| 483829 | n/a | n/a | ACTCTGCGCG | 10537 | 10556 | 73 | 522 |
| | | | ATTCACTGAG | | | | |
| 483830 | n/a | n/a | CTCCCACTTC | 10645 | 10664 | 83 | 523 |
| | | | AGTTTCTCCA | | | | |
| 483831 | n/a | n/a | GCTTCCTCCC | 10650 | 10669 | 86 | 524 |
| | | | ACTTCAGTTT | | | | |
| 483832 | n/a | n/a | GGCATGCTTC | 10655 | 10674 | 89 | 525 |
| | | | CTCCCACTTC | | | | |
| 483833 | n/a | n/a | ACTTAGGCAT | 10660 | 10679 | 89 | 526 |
| | | | GCTTCCTCCC | | | | |
| 483834 | n/a | n/a | GGAAAACTTA | 10665 | 10684 | 92 | 527 |
| | | | GGCATGCTTC | | | | |
| 483835 | n/a | n/a | GCTAAGGAAA | 10670 | 10689 | 85 | 528 |
| | | | ACTTAGGCAT | | | | |
| 483836 | n/a | n/a | CATCAGCTAA | 10675 | 10694 | 53 | 529 |
| | | | GGAAAACTTA | | | | |
| 483837 | n/a | n/a | CAAGGCATCA | 10680 | 10699 | 27 | 530 |
| | | | GCTAAGGAAA | | | | |
| 483838 | n/a | n/a | ATTTGTACTT | 10702 | 10721 | 77 | 531 |
| | | | GAATCCAGGG | | | | |
| 483839 | n/a | n/a | GTGATGACTT | 10727 | 10746 | 87 | 532 |
| | | | CCCAGGGTCT | | | | |
| 483840 | n/a | n/a | CAGCTGTGAT | 10732 | 10751 | 84 | 533 |
| | | | GACTTCCCAG | | | | |
| 483841 | n/a | n/a | CAGGACAGCT | 10737 | 10756 | 80 | 534 |
| | | | GTGATGACTT | | | | |
| 483842 | n/a | n/a | CAGACCAGGA | 10742 | 10761 | 72 | 535 |
| | | | CAGCTGTGAT | | | | |
| 483843 | n/a | n/a | CACACGCAGA | 10748 | 10767 | 54 | 536 |
| | | | CCAGGACAGC | | | | |
| 483844 | n/a | n/a | AGACACACAC | 10753 | 10772 | 44 | 537 |
| | | | GCAGACCAGG | | | | |
| 483845 | n/a | n/a | ATGCAAGACA | 10758 | 10777 | 45 | 538 |
| | | | CACACGCAGA | | | | |
| 483846 | n/a | n/a | GCTTCATGCA | 10763 | 10782 | 78 | 539 |
| | | | AGACACACAC | | | | |
| 483847 | n/a | n/a | ATGTCAGAGA | 10814 | 10833 | 67 | 540 |
| | | | GGCTCAGCAA | | | | |
| 483848 | n/a | n/a | AATCCATGTC | 10819 | 10838 | 93 | 541 |
| | | | AGAGAGGCTC | | | | |
| 483849 | n/a | n/a | AGAAAAATCC | 10824 | 10843 | 37 | 542 |
| | | | ATGTCAGAGA | | | | |
| 483850 | n/a | n/a | ACTAAAGAAA | 10829 | 10848 | 49 | 543 |
| | | | AATCCATGTC | | | | |
| 483851 | n/a | n/a | TAGTTACTAA | 10834 | 10853 | 21 | 544 |
| | | | AGAAAAATCC | | | | |
| 483852 | n/a | n/a | GGATAGTCGA | 10940 | 10959 | 88 | 545 |
| | | | TTTACCAGAA | | | | |
| 483853 | n/a | n/a | TCTTTGGATA | 10945 | 10964 | 66 | 546 |
| | | | GTCGATTTAC | | | | |
| 483854 | n/a | n/a | ACTAAAATGC | 10968 | 10987 | 2 | 547 |
| | | | TAATAGGAAG | | | | |
| 483855 | n/a | n/a | GATATACTAA | 10973 | 10992 | 9 | 548 |
| | | | AATGCTAATA | | | | |
| 483856 | n/a | n/a | CAAGAGATAT | 10978 | 10997 | 32 | 549 |
| | | | ACTAAAATGC | | | | |
| 483857 | n/a | n/a | ATGATCAAGA | 10983 | 11002 | 36 | 550 |
| | | | GATATACTAA | | | | |
| 483858 | n/a | n/a | AGAAAATGAT | 10988 | 11007 | 6 | 551 |
| | | | CAAGAGATAT | | | | |
| 483859 | n/a | n/a | TATAAAGAAA | 10993 | 11012 | 6 | 552 |
| | | | ATGATCAAGA | | | | |
| 483860 | n/a | n/a | ATGTGTATAA | 10998 | 11017 | 0 | 553 |
| | | | AGAAAATGAT | | | | |
| 483861 | n/a | n/a | ATGCAATGTG | 11003 | 11022 | 36 | 554 |
| | | | TATAAAGAAA | | | | |
| 483862 | n/a | n/a | TATCTATGCA | 11008 | 11027 | 75 | 555 |
| | | | ATGTGTATAA | | | | |
| 483863 | n/a | n/a | ATTCATAACT | 11042 | 11061 | 52 | 556 |
| | | | ATATCTACAG | | | | |
| 483864 | n/a | n/a | ACAAGATTCA | 11047 | 11066 | 31 | 557 |
| | | | TAACTATATC | | | | |
| 483865 | n/a | n/a | AGAAAACAAG | 11052 | 11071 | 33 | 558 |
| | | | ATTCATAACT | | | | |
| 483866 | n/a | n/a | CCTCGATGTT | 11074 | 11093 | 90 | 559 |
| | | | ACATTAAGGG | | | | |
| 483867 | n/a | n/a | GGAAACCTCG | 11079 | 11098 | 59 | 560 |
| | | | ATGTTACATT | | | | |
| 483868 | n/a | n/a | ATTGCAACCA | 11123 | 11142 | 60 | 561 |
| | | | CTAGGACATT | | | | |
| 483869 | n/a | n/a | GGGTTATTGC | 11128 | 11147 | 91 | 562 |
| | | | AACCACTAGG | | | | |
| 483870 | n/a | n/a | CACAGTTAAA | 11158 | 11177 | 86 | 563 |
| | | | GTGTGGTACA | | | | |
| 483871 | n/a | n/a | TAGGTCACAG | 11163 | 11182 | 60 | 564 |
| | | | TTAAAGTGTG | | | | |
| 483872 | n/a | n/a | ATGCCTAGGT | 11168 | 11187 | 74 | 565 |
| | | | CACAGTTAAA | | | | |
| 483873 | n/a | n/a | TGCCAATGCC | 11173 | 11192 | 90 | 566 |
| | | | TAGGTCACAG | | | | |
| 483874 | n/a | n/a | AGCAATGCCA | 11178 | 11197 | 91 | 567 |
| | | | ATGCCTAGGT | | | | |
| 483875 | n/a | n/a | CACAGCGATA | 11199 | 11218 | 87 | 568 |
| | | | ATCACACAAG | | | | |

TABLE 17
Inhibition of DGAT2 mRNA by 5-10-5 MOE
gapmers targeting SEQ ID NO: 1 and 2

| | SEQ | SEQ | | | SEQ | SEQ | |
|---|---|---|---|---|---|---|---|
| | ID | ID | | % | ID | ID | |
| | NO: | NO: | | in- | NO: | NO: | |
| | 1 | 1 | | hi- | 2 | 2 | SEQ |
| ISIS | Start | Stop | | bi- | Start | Stop | ID |
| NO | Site | Site | Sequence | tion | Site | Site | NO |
| 413433 | n/a | n/a | GCCTGGACAA | 89 | 32431 | 32450 | 425 |
| | | | GTCCTGCCCA | | | | |
| 472665 | 1870 | 1889 | CTCCAACTCC | 56 | 41841 | 41860 | 933 |
| | | | TCCCCTTGGC | | | | |
| 472666 | 1871 | 1890 | TCTCCAACTC | 37 | 41842 | 41861 | 934 |
| | | | CTCCCCTTGG | | | | |
| 472667 | 1873 | 1892 | GCTCTCCAAC | 63 | 41844 | 41863 | 935 |
| | | | TCCTCCCCTT | | | | |
| 472668 | 1874 | 1893 | TGCTCTCCAA | 65 | 41845 | 41864 | 936 |
| | | | CTCCTCCCCT | | | | |
| 472669 | 1917 | 1936 | CATTCCAGAT | 63 | 41888 | 41907 | 937 |
| | | | GCCTACTACT | | | | |
| 472670 | 1918 | 1937 | GCATTCCAGA | 68 | 41889 | 41908 | 938 |
| | | | TGCCTACTAC | | | | |
| 472671 | 1919 | 1938 | AGCATTCCAG | 81 | 41890 | 41909 | 939 |
| | | | ATGCCTACTA | | | | |
| 472672 | 1920 | 1939 | GAGCATTCCA | 77 | 41891 | 41910 | 940 |
| | | | GATGCCTACT | | | | |
| 472673 | 1993 | 2012 | CCTGGAGGCC | 33 | 41964 | 41983 | 941 |
| | | | AGTCCAGGCT | | | | |
| 472674 | 1994 | 2013 | TCCTGGAGGC | 22 | 41965 | 41984 | 942 |
| | | | CAGTCCAGGC | | | | |
| 472675 | 1996 | 2015 | CATCCTGGAG | 14 | 41967 | 41986 | 943 |
| | | | GCCAGTCCAG | | | | |
| 472676 | 1997 | 2016 | TCATCCTGGA | 47 | 41968 | 41987 | 944 |
| | | | GGCCAGTCCA | | | | |
| 472677 | 1999 | 2018 | CCTCATCCTG | 57 | 41970 | 41989 | 945 |
| | | | GAGGCCAGTC | | | | |
| 472678 | 2000 | 2019 | TCCTCATCCT | 37 | 41971 | 41990 | 946 |
| | | | GGAGGCCAGT | | | | |
| 472679 | 2001 | 2020 | ATCCTCATCC | 50 | 41972 | 41991 | 947 |
| | | | TGGAGGCCAG | | | | |
| 472680 | 2002 | 2021 | CATCCTCATC | 56 | 41973 | 41992 | 948 |
| | | | CTGGAGGCCA | | | | |
| 472681 | 2004 | 2023 | CCCATCCTCA | 29 | 41975 | 41994 | 949 |
| | | | TCCTGGAGGC | | | | |
| 472682 | 2005 | 2024 | CCCCATCCTC | 21 | 41976 | 41995 | 950 |
| | | | ATCCTGGAGG | | | | |
| 472683 | 2007 | 2026 | ACCCCCATCC | 24 | 41978 | 41997 | 951 |
| | | | TCATCCTGGA | | | | |
| 472684 | 2008 | 2027 | CACCCCCATC | 8 | 41979 | 41998 | 952 |
| | | | CTCATCCTGG | | | | |
| 472685 | 2009 | 2028 | CCACCCCCAT | 39 | 41980 | 41999 | 953 |
| | | | CCTCATCCTG | | | | |
| 472686 | 2011 | 2030 | TGCCACCCCC | 46 | 41982 | 42001 | 954 |
| | | | ATCCTCATCC | | | | |
| 472687 | 2012 | 2031 | TTGCCACCCC | 48 | 41983 | 42002 | 955 |
| | | | CATCCTCATC | | | | |
| 472688 | 2013 | 2032 | ATTGCCACCC | 57 | 41984 | 42003 | 956 |
| | | | CCATCCTCAT | | | | |
| 472689 | 2015 | 2034 | TCATTGCCAC | 43 | 41986 | 42005 | 957 |
| | | | CCCCATCCTC | | | | |
| 472690 | 2016 | 2035 | GTCATTGCCA | 29 | 41987 | 42006 | 958 |
| | | | CCCCCATCCT | | | | |
| 472691 | 2017 | 2036 | TGTCATTGCC | 51 | 41988 | 42007 | 959 |
| | | | ACCCCCATCC | | | | |
| 472692 | 2019 | 2038 | GGTGTCATTG | 74 | 41990 | 42009 | 960 |
| | | | CCACCCCCAT | | | | |
| 472693 | 2079 | 2098 | GCTCATGGTG | 77 | 42050 | 42069 | 961 |
| | | | GCGGCATCCT | | | | |
| 472694 | 2080 | 2099 | AGCTCATGGT | 66 | 42051 | 42070 | 962 |
| | | | GGCGGCATCC | | | | |
| 472695 | 2082 | 2101 | CTAGCTCATG | 65 | 42053 | 42072 | 963 |
| | | | GTGGCGGCAT | | | | |
| 472696 | 2083 | 2102 | CCTAGCTCAT | 68 | 42054 | 42073 | 964 |
| | | | GGTGGCGGCA | | | | |
| 472697 | 2085 | 2104 | CACCTAGCTC | 49 | 42056 | 42075 | 965 |
| | | | ATGGTGGCGG | | | | |
| 472698 | 2086 | 2105 | CCACCTAGCT | 44 | 42057 | 42076 | 966 |
| | | | CATGGTGGCG | | | | |
| 472699 | 2088 | 2107 | CTCCACCTAG | 18 | 42059 | 42078 | 967 |
| | | | CTCATGGTGG | | | | |
| 472700 | 2089 | 2108 | ACTCCACCTA | 61 | 42060 | 42079 | 968 |
| | | | GCTCATGGTG | | | | |
| 472701 | 2090 | 2109 | TACTCCACCT | 46 | 42061 | 42080 | 969 |
| | | | AGCTCATGGT | | | | |
| 472702 | 2092 | 2111 | GTTACTCCAC | 51 | 42063 | 42082 | 970 |
| | | | CTAGCTCATG | | | | |
| 472703 | 2093 | 2112 | AGTTACTCCA | 58 | 42064 | 42083 | 971 |
| | | | CCTAGCTCAT | | | | |
| 472704 | 2094 | 2113 | CAGTTACTCC | 66 | 42065 | 42084 | 972 |
| | | | ACCTAGCTCA | | | | |
| 472705 | 2095 | 2114 | CCAGTTACTC | 80 | 42066 | 42085 | 973 |
| | | | CACCTAGCTC | | | | |
| 472706 | 2097 | 2116 | AACCAGTTAC | 71 | 42068 | 42087 | 974 |
| | | | TCCACCTAGC | | | | |
| 472707 | 2098 | 2117 | AAACCAGTTA | 68 | 42069 | 42088 | 975 |
| | | | CTCCACCTAG | | | | |
| 472708 | 2100 | 2119 | AAAAACCAGT | 67 | 42071 | 42090 | 976 |
| | | | TACTCCACCT | | | | |
| 472709 | 2101 | 2120 | GAAAAACCAG | 68 | 42072 | 42091 | 977 |
| | | | TTACTCCACC | | | | |
| 472710 | 2103 | 2122 | AAGAAAAACC | 53 | 42074 | 42093 | 978 |
| | | | AGTTACTCCA | | | | |
| 472711 | 2104 | 2123 | CAAGAAAAAC | 61 | 42075 | 42094 | 979 |
| | | | CAGTTACTCC | | | | |
| 472712 | 2106 | 2125 | CCCAAGAAAA | 67 | 42077 | 42096 | 980 |
| | | | ACCAGTTACT | | | | |
| 472713 | 2107 | 2126 | ACCCAAGAAA | 71 | 42078 | 42097 | 981 |
| | | | AACCAGTTAC | | | | |
| 472714 | 2108 | 2127 | CACCCAAGAA | 56 | 42079 | 42098 | 982 |
| | | | AAACCAGTTA | | | | |
| 472715 | 2109 | 2128 | CCACCCAAGA | 61 | 42080 | 42099 | 983 |
| | | | AAAACCAGTT | | | | |
| 472716 | 2111 | 2130 | AGCCACCCAA | 62 | 42082 | 42101 | 984 |
| | | | GAAAAACCAG | | | | |
| 472717 | 2112 | 2131 | CAGCCACCCA | 69 | 42083 | 42102 | 985 |
| | | | AGAAAAACCA | | | | |
| 472718 | 2114 | 2133 | ATCAGCCACC | 58 | 42085 | 42104 | 986 |
| | | | CAAGAAAAAC | | | | |
| 472719 | 2115 | 2134 | CATCAGCCAC | 46 | 42086 | 42105 | 987 |
| | | | CCAAGAAAAA | | | | |
| 472720 | 2116 | 2135 | TCATCAGCCA | 64 | 42087 | 42106 | 988 |
| | | | CCCAAGAAAA | | | | |
| 472721 | 2118 | 2137 | TGTCATCAGC | 48 | 42089 | 42108 | 989 |
| | | | CACCCAAGAA | | | | |
| 472722 | 2119 | 2138 | ATGTCATCAG | 50 | 42090 | 42109 | 990 |
| | | | CCACCCAAGA | | | | |
| 472723 | 2121 | 2140 | CCATGTCATC | 79 | 42092 | 42111 | 991 |
| | | | AGCCACCCAA | | | | |
| 472724 | 2122 | 2141 | TCCATGTCAT | 79 | 42093 | 42112 | 992 |
| | | | CAGCCACCCA | | | | |
| 472725 | 2123 | 2142 | ATCCATGTCA | 83 | 42094 | 42113 | 993 |
| | | | TCAGCCACCC | | | | |
| 472726 | 2124 | 2143 | CATCCATGTC | 80 | 42095 | 42114 | 994 |
| | | | ATCAGCCACC | | | | |
| 472727 | 2126 | 2145 | TGCATCCATG | 81 | 42097 | 42116 | 995 |
| | | | TCATCAGCCA | | | | |
| 472728 | 2127 | 2146 | CTGCATCCAT | 78 | 42098 | 42117 | 996 |
| | | | GTCATCAGCC | | | | |
| 413319 | 2128 | 2147 | GCTGCATCCA | 74 | 42099 | 42118 | 154 |
| | | | TGTCATCAGC | | | | |
| 472729 | 2129 | 2148 | TGCTGCATCC | 80 | 42100 | 42119 | 997 |
| | | | ATGTCATCAG | | | | |
| 472730 | 2130 | 2149 | GTGCTGCATC | 68 | 42101 | 42120 | 998 |
| | | | CATGTCATCA | | | | |
| 472731 | 2132 | 2151 | CTGTGCTGCA | 64 | 42103 | 42122 | 999 |
| | | | TCCATGTCAT | | | | |
| 472732 | 2133 | 2152 | TCTGTGCTGC | 80 | 42104 | 42123 | 1000 |
| | | | ATCCATGTCA | | | | |
| 472733 | 2134 | 2153 | GTCTGTGCTG | 83 | 42105 | 42124 | 1001 |
| | | | CATCCATGTC | | | | |
| 472734 | 2135 | 2154 | AGTCTGTGCT | 68 | 42106 | 42125 | 1002 |
| | | | GCATCCATGT | | | | |
| 472735 | 2137 | 2156 | TGAGTCTGTG | 71 | 42108 | 42127 | 1003 |
| | | | CTGCATCCAT | | | | |
| 472736 | 2138 | 2157 | CTGAGTCTGT | 78 | 42109 | 42128 | 1004 |
| | | | GCTGCATCCA | | | | |
| 472737 | 2139 | 2158 | GCTGAGTCTG | 80 | 42110 | 42129 | 1005 |
| | | | TGCTGCATCC | | | | |
| 472738 | 2140 | 2159 | GGCTGAGTCT | 84 | 42111 | 42130 | 1006 |
| | | | GTGCTGCATC | | | | |
| 472739 | 2141 | 2160 | AGGCTGAGTC | 76 | 42112 | 42131 | 1007 |
| | | | TGTGCTGCAT | | | | |
| 472740 | 2142 | 2161 | AAGGCTGAGT | 81 | 42113 | 42132 | 1008 |
| | | | CTGTGCTGCA | | | | |

TABLE 18
Inhibition of DGAT2 mRNA by 5-10-5 MOE
gapmers targeting SEQ ID NO: 1 and 2

| | SEQ | SEQ | | | SEQ | SEQ | |
|---|---|---|---|---|---|---|---|
| | ID | ID | | % | ID | ID | |
| | NO: | NO: | | in- | NO: | NO: | |
| | 1 | 1 | | hi- | 2 | 2 | SEQ |
| ISIS | Start | Stop | | bi- | Start | Stop | ID |
| NO | Site | Site | Sequence | tion | Site | Site | NO |
| 413433 | n/a | n/a | GCCTGGACAA | 89 | 32431 | 32450 | 425 |
| | | | GTCCTGCCCA | | | | |
| 411901 | 695 | 714 | GTCAGCAGGT | 64 | 37223 | 37242 | 64 |
| | | | TGTGTGTCTT | | | | |
| 472741 | 2144 | 2163 | CCAAGGCTGA | 60 | 42115 | 42134 | 1009 |
| | | | GTCTGTGCTG | | | | |
| 472742 | 2145 | 2164 | GCCAAGGCTG | 63 | 42116 | 42135 | 1010 |
| | | | AGTCTGTGCT | | | | |
| 472743 | 2147 | 2166 | AGGCCAAGGC | 55 | 42118 | 42137 | 1011 |
| | | | TGAGTCTGTG | | | | |
| 472744 | 2148 | 2167 | CAGGCCAAGG | 39 | 42119 | 42138 | 1012 |
| | | | CTGAGTCTGT | | | | |
| 472745 | 2150 | 2169 | TCCAGGCCAA | 56 | 42121 | 42140 | 1013 |
| | | | GGCTGAGTCT | | | | |
| 472746 | 2151 | 2170 | CTCCAGGCCA | 62 | 42122 | 42141 | 1014 |
| | | | AGGCTGAGTC | | | | |
| 472747 | 2152 | 2171 | GCTCCAGGCC | 77 | 42123 | 42142 | 1015 |
| | | | AAGGCTGAGT | | | | |
| 472748 | 2153 | 2172 | TGCTCCAGGC | 43 | 42124 | 42143 | 1016 |
| | | | CAAGGCTGAG | | | | |
| 472749 | 2155 | 2174 | TGTGCTCCAG | 63 | 42126 | 42145 | 1017 |
| | | | GCCAAGGCTG | | | | |
| 472750 | 2156 | 2175 | ATGTGCTCCA | 69 | 42127 | 42146 | 1018 |
| | | | GGCCAAGGCT | | | | |
| 472751 | 2181 | 2200 | AGGTAAACTG | 35 | 42152 | 42171 | 1019 |
| | | | AGGCCACCAG | | | | |
| 472752 | 2183 | 2202 | GAAGGTAAAC | 72 | 42154 | 42173 | 1020 |
| | | | TGAGGCCACC | | | | |
| 472753 | 2184 | 2203 | GGAAGGTAAA | 45 | 42155 | 42174 | 1021 |
| | | | CTGAGGCCAC | | | | |
| 472754 | 2214 | 2233 | TCTTCCTCAC | 49 | 42185 | 42204 | 1022 |
| | | | ATCCAGAATC | | | | |
| 472755 | 2215 | 2234 | CTCTTCCTCA | 62 | 42186 | 42205 | 1023 |
| | | | CATCCAGAAT | | | | |
| 472756 | 2237 | 2256 | CAGGCCCCTT | 73 | 42208 | 42227 | 1024 |
| | | | CTGAAGAGGG | | | | |
| 472757 | 2238 | 2257 | CCAGGCCCCT | 68 | 42209 | 42228 | 1025 |
| | | | TCTGAAGAGG | | | | |
| 472758 | 2240 | 2259 | GGCCAGGCCC | 41 | 42211 | 42230 | 1026 |
| | | | CTTCTGAAGA | | | | |
| 472759 | 2241 | 2260 | AGGCCAGGCC | 51 | 42212 | 42231 | 1027 |
| | | | CCTTCTGAAG | | | | |
| 472760 | 2243 | 2262 | GAAGGCCAGG | 32 | 42214 | 42233 | 1028 |
| | | | CCCCTTCTGA | | | | |
| 472761 | 2244 | 2263 | AGAAGGCCAG | 28 | 42215 | 42234 | 1029 |
| | | | GCCCCTTCTG | | | | |
| 472762 | 2245 | 2264 | CAGAAGGCCA | 24 | 42216 | 42235 | 1030 |
| | | | GGCCCCTTCT | | | | |
| 472763 | 2247 | 2266 | CTCAGAAGGC | 54 | 42218 | 42237 | 1031 |
| | | | CAGGCCCCTT | | | | |
| 472764 | 2248 | 2267 | GCTCAGAAGG | 72 | 42219 | 42238 | 1032 |
| | | | CCAGGCCCCT | | | | |
| 472765 | 2250 | 2269 | CTGCTCAGAA | 60 | 42221 | 42240 | 1033 |
| | | | GGCCAGGCCC | | | | |
| 472766 | 2251 | 2270 | GCTGCTCAGA | 81 | 42222 | 42241 | 1034 |
| | | | AGGCCAGGCC | | | | |
| 472767 | 2253 | 2272 | CTGCTGCTCA | 51 | 42224 | 42243 | 1035 |
| | | | GAAGGCCAGG | | | | |
| 472768 | 2254 | 2273 | TCTGCTGCTC | 79 | 42225 | 42244 | 1036 |
| | | | AGAAGGCCAG | | | | |
| 472769 | 2255 | 2274 | ATCTGCTGCT | 63 | 42226 | 42245 | 1037 |
| | | | CAGAAGGCCA | | | | |
| 472770 | 2256 | 2275 | AATCTGCTGC | 69 | 42227 | 42246 | 1038 |
| | | | TCAGAAGGCC | | | | |
| 472771 | 2258 | 2277 | CTAATCTGCT | 57 | 42229 | 42248 | 1039 |
| | | | GCTCAGAAGG | | | | |
| 472772 | 2259 | 2278 | ACTAATCTGC | 63 | 42230 | 42249 | 1040 |
| | | | TGCTCAGAAG | | | | |
| 472773 | 2260 | 2279 | AACTAATCTG | 52 | 42231 | 42250 | 1041 |
| | | | CTGCTCAGAA | | | | |
| 472774 | 2261 | 2280 | GAACTAATCT | 45 | 42232 | 42251 | 1042 |
| | | | GCTGCTCAGA | | | | |
| 472775 | 2262 | 2281 | GGAACTAATC | 70 | 42233 | 42252 | 1043 |
| | | | TGCTGCTCAG | | | | |
| 472776 | 2263 | 2282 | TGGAACTAAT | 73 | 42234 | 42253 | 1044 |
| | | | CTGCTGCTCA | | | | |
| 472777 | 2264 | 2283 | TTGGAACTAA | 70 | 42235 | 42254 | 1045 |
| | | | TCTGCTGCTC | | | | |
| 472778 | 2266 | 2285 | CTTTGGAACT | 69 | 42237 | 42256 | 1046 |
| | | | AATCTGCTGC | | | | |
| 472779 | 2267 | 2286 | GCTTTGGAAC | 70 | 42238 | 42257 | 1047 |
| | | | TAATCTGCTG | | | | |
| 472780 | 2268 | 2287 | TGCTTTGGAA | 76 | 42239 | 42258 | 1048 |
| | | | CTAATCTGCT | | | | |
| 472781 | 2269 | 2288 | CTGCTTTGGA | 71 | 42240 | 42259 | 1049 |
| | | | ACTAATCTGC | | | | |
| 472782 | 2270 | 2289 | CCTGCTTTGG | 55 | 42241 | 42260 | 1050 |
| | | | AACTAATCTG | | | | |
| 472783 | 2272 | 2291 | CACCTGCTTT | 65 | 42243 | 42262 | 1051 |
| | | | GGAACTAATC | | | | |
| 472784 | 2273 | 2292 | CCACCTGCTT | 78 | 42244 | 42263 | 1052 |
| | | | TGGAACTAAT | | | | |
| 472785 | 2275 | 2294 | GGCCACCTGC | 66 | 42246 | 42265 | 1053 |
| | | | TTTGGAACTA | | | | |
| 472786 | 2276 | 2295 | GGGCCACCTG | 67 | 42247 | 42266 | 1054 |
| | | | CTTTGGAACT | | | | |
| 472787 | 2296 | 2315 | AAAGTGAGGC | 58 | 42267 | 42286 | 1055 |
| | | | TTGGGTTCGG | | | | |
| 472788 | 2297 | 2316 | AAAAGTGAGG | 54 | 42268 | 42287 | 1056 |
| | | | CTTGGGTTCG | | | | |
| 472789 | 2299 | 2318 | AGAAAAGTGA | 65 | 42270 | 42289 | 1057 |
| | | | GGCTTGGGTT | | | | |
| 472790 | 2300 | 2319 | CAGAAAAGTG | 61 | 42271 | 42290 | 1058 |
| | | | AGGCTTGGGT | | | | |
| 472791 | 2302 | 2321 | CACAGAAAAG | 70 | 42273 | 42292 | 1059 |
| | | | TGAGGCTTGG | | | | |
| 472792 | 2303 | 2322 | GCACAGAAAA | 81 | 42274 | 42293 | 1060 |
| | | | GTGAGGCTTG | | | | |
| 472793 | 2305 | 2324 | AGGCACAGAA | 82 | 42276 | 42295 | 1061 |
| | | | AAGTGAGGCT | | | | |
| 472794 | 2306 | 2325 | AAGGCACAGA | 58 | 42277 | 42296 | 1062 |
| | | | AAAGTGAGGC | | | | |
| 472795 | 2308 | 2327 | GGAAGGCACA | 29 | 42279 | 42298 | 1063 |
| | | | GAAAAGTGAG | | | | |
| 472796 | 2309 | 2328 | AGGAAGGCAC | 24 | 42280 | 42299 | 1064 |
| | | | AGAAAAGTGA | | | | |
| 472797 | 2311 | 2330 | TCAGGAAGGC | 67 | 42282 | 42301 | 1065 |
| | | | ACAGAAAAGT | | | | |
| 472798 | 2312 | 2331 | CTCAGGAAGG | 32 | 42283 | 42302 | 1066 |
| | | | CACAGAAAAG | | | | |
| 472799 | 2314 | 2333 | CCCTCAGGAA | 48 | 42285 | 42304 | 1067 |
| | | | GGCACAGAAA | | | | |
| 472800 | 2315 | 2334 | CCCCTCAGGA | 55 | 42286 | 42305 | 1068 |
| | | | AGGCACAGAA | | | | |
| 472801 | 2316 | 2335 | CCCCCTCAGG | 57 | 42287 | 42306 | 1069 |
| | | | AAGGCACAGA | | | | |
| 472802 | 2318 | 2337 | AACCCCCTCA | 57 | 42289 | 42308 | 1070 |
| | | | GGAAGGCACA | | | | |
| 472803 | 2319 | 2338 | CAACCCCCTC | 63 | 42290 | 42309 | 1071 |
| | | | AGGAAGGCAC | | | | |
| 472804 | 2320 | 2339 | CCAACCCCCT | 66 | 42291 | 42310 | 1072 |
| | | | CAGGAAGGCA | | | | |
| 472805 | 2321 | 2340 | CCCAACCCCC | 67 | 42292 | 42311 | 1073 |
| | | | TCAGGAAGGC | | | | |
| 472806 | 2322 | 2341 | GCCCAACCCC | 1 | 42293 | 42312 | 1074 |
| | | | CTCAGGAAGG | | | | |
| 472807 | 2372 | 2391 | CTCATCAAGA | 47 | 42343 | 42362 | 1075 |
| | | | GATAACAGAA | | | | |
| 472808 | 2374 | 2393 | ATCTCATCAA | 56 | 42345 | 42364 | 1076 |
| | | | GAGATAACAG | | | | |
| 472809 | 2375 | 2394 | GATCTCATCA | 48 | 42346 | 42365 | 1077 |
| | | | AGAGATAACA | | | | |
| 472810 | 2377 | 2396 | ATGATCTCAT | 69 | 42348 | 42367 | 1078 |
| | | | CAAGAGATAA | | | | |
| 472811 | 2398 | 2417 | ACAAAAGTCT | 82 | 42369 | 42388 | 1079 |
| | | | GACATGGTGC | | | | |
| 472812 | 2400 | 2419 | ATACAAAAGT | 74 | 42371 | 42390 | 1080 |
| | | | CTGACATGGT | | | | |
| 472813 | 2401 | 2420 | TATACAAAAG | 52 | 42372 | 42391 | 1081 |
| | | | TCTGACATGG | | | | |
| 472814 | 2403 | 2422 | CATATACAAA | 45 | 42374 | 42393 | 1082 |
| | | | AGTCTGACAT | | | | |
| 472815 | 2404 | 2423 | GCATATACAA | 78 | 42375 | 42394 | 1083 |
| | | | AAGTCTGACA | | | | |
| 472816 | 2405 | 2424 | GGCATATACA | 81 | 42376 | 42395 | 1084 |
| | | | AAAGTCTGAC | | | | |

TABLE 19
Inhibition of DGAT2 mRNA by 3-10-4 MOE
gapmers targeting SEQ ID NOs: 1 and 2

| | SEQ | SEQ | | | SEQ | SEQ | |
|---|---|---|---|---|---|---|---|
| | ID | ID | | % | ID | ID | |
| | NO: | NO: | | in- | NO: | NO: | |
| | 1 | 1 | | hi- | 2 | 2 | SEQ |
| ISIS | Start | Stop | | bi- | Start | Stop | ID |
| NO | Site | Site | Sequence | tion | Site | Site | NO |
| 496047 | 1000 | 1016 | CATTCTTGC | 42 | 38153 | 38169 | 1102 |
| | | | CAGGCATG | | | | |
| 496048 | 1003 | 1019 | CTGCATTCT | 61 | 38156 | 38172 | 1103 |
| | | | TGCCAGGC | | | | |
| 496049 | 1004 | 1020 | ACTGCATTC | 43 | 38157 | 38173 | 1104 |
| | | | TTGCCAGG | | | | |
| 496050 | 1005 | 1021 | GACTGCATT | 31 | 38158 | 38174 | 1105 |
| | | | CTTGCCAG | | | | |
| 496051 | 1015 | 1031 | TCCGCAGGG | 59 | 38168 | 38184 | 1106 |
| | | | TGACTGCA | | | | |
| 496052 | 1016 | 1032 | TTCCGCAGG | 60 | 38169 | 38185 | 1107 |
| | | | GTGACTGC | | | | |
| 496053 | 1017 | 1033 | GTTCCGCAG | 64 | 38170 | 38186 | 1108 |
| | | | GGTGACTG | | | | |
| 496054 | 1096 | 1112 | ACACTTCAT | 39 | 39143 | 39159 | 1109 |
| | | | TCTCTCCA | | | | |
| 496055 | 1097 | 1113 | TACACTTCA | 39 | 39144 | 39160 | 1110 |
| | | | TTCTCTCC | | | | |
| 496056 | 1098 | 1114 | GTACACTTC | 44 | 39145 | 39161 | 1111 |
| | | | ATTCTCTC | | | | |
| 496057 | 1099 | 1115 | TGTACACTT | 36 | 39146 | 39162 | 1112 |
| | | | CATTCTCT | | | | |
| 496058 | 1100 | 1116 | TTGTACACT | 28 | 39147 | 39163 | 1113 |
| | | | TCATTCTC | | | | |
| 496059 | 1101 | 1117 | CTTGTACAC | 35 | 39148 | 39164 | 1114 |
| | | | TTCATTCT | | | | |
| 496060 | 1102 | 1118 | GCTTGTACA | 48 | 39149 | 39165 | 1115 |
| | | | CTTCATTC | | | | |
| 496061 | 1103 | 1119 | TGCTTGTAC | 40 | 39150 | 39166 | 1116 |
| | | | ACTTCATT | | | | |
| 496062 | 1104 | 1120 | CTGCTTGTA | 63 | 39151 | 39167 | 1117 |
| | | | CACTTCAT | | | | |
| 496063 | 1105 | 1121 | CCTGCTTGT | 62 | 39152 | 39168 | 1118 |
| | | | ACACTTCA | | | | |
| 496064 | 1106 | 1122 | ACCTGCTTG | 47 | 39153 | 39169 | 1119 |
| | | | TACACTTC | | | | |
| 496065 | 1107 | 1123 | CACCTGCTT | 39 | 39154 | 39170 | 1120 |
| | | | GTACACTT | | | | |
| 496066 | 1108 | 1124 | TCACCTGCT | 43 | 39155 | 39171 | 1121 |
| | | | TGTACACT | | | | |
| 496067 | 1109 | 1125 | ATCACCTGC | 23 | 39156 | 39172 | 1122 |
| | | | TTGTACAC | | | | |
| 496068 | 1119 | 1135 | CTCCTCGAA | 9 | 39166 | 39182 | 1123 |
| | | | GATCACCT | | | | |
| 496069 | 1120 | 1136 | CCTCCTCGA | 26 | 39167 | 39183 | 1124 |
| | | | AGATCACC | | | | |
| 496070 | 1121 | 1137 | CCCTCCTCG | 25 | 39168 | 39184 | 1125 |
| | | | AAGATCAC | | | | |
| 496071 | 1357 | 1373 | TGTCGAAGA | 36 | 41328 | 41344 | 1126 |
| | | | GCTTCACC | | | | |
| 496072 | 1358 | 1374 | TTGTCGAAG | 7 | 41329 | 41345 | 1127 |
| | | | AGCTTCAC | | | | |
| 496073 | 1359 | 1375 | CTTGTCGAA | 22 | 41330 | 41346 | 1128 |
| | | | GAGCTTCA | | | | |
| 496074 | 1362 | 1378 | GTGCTTGTC | 44 | 41333 | 41349 | 1129 |
| | | | GAAGAGCT | | | | |
| 496075 | 1363 | 1379 | TGTGCTTGT | 33 | 41334 | 41350 | 1130 |
| | | | CGAAGAGC | | | | |
| 496076 | 1364 | 1380 | TTGTGCTTG | 10 | 41335 | 41351 | 1131 |
| | | | TCGAAGAG | | | | |
| 496077 | 1410 | 1426 | TCAGTTCAC | 11 | 41381 | 41397 | 1132 |
| | | | CTCCAGGA | | | | |
| 496078 | 1411 | 1427 | CTCAGTTCA | 11 | 41382 | 41398 | 1133 |
| | | | CCTCCAGG | | | | |
| 496079 | 1412 | 1428 | GCTCAGTTC | 25 | 41383 | 41399 | 1134 |
| | | | ACCTCCAG | | | | |
| 496080 | 1413 | 1429 | GGCTCAGTT | 56 | 41384 | 41400 | 1135 |
| | | | CACCTCCA | | | | |
| 496081 | 1502 | 1518 | TAACCCACA | 61 | 41473 | 41489 | 1136 |
| | | | GACACCCA | | | | |
| 496082 | 1503 | 1519 | ATAACCCAC | 55 | 41474 | 41490 | 1137 |
| | | | AGACACCC | | | | |
| 496083 | 1504 | 1520 | AATAACCCA | 59 | 41475 | 41491 | 1138 |
| | | | CAGACACC | | | | |
| 496084 | 1627 | 1643 | AGATTTAGC | 17 | 41598 | 41614 | 1139 |
| | | | CACCACCT | | | | |
| 496085 | 1628 | 1644 | CAGATTTAG | 58 | 41599 | 41615 | 1140 |
| | | | CCACCACC | | | | |
| 496086 | 1629 | 1645 | CCAGATTTA | 60 | 41600 | 41616 | 1141 |
| | | | GCCACCAC | | | | |
| 496087 | 1630 | 1646 | CCCAGATTT | 62 | 41601 | 41617 | 1142 |
| | | | AGCCACCA | | | | |
| 496088 | 1631 | 1647 | GCCCAGATT | 28 | 41602 | 41618 | 1143 |
| | | | TAGCCACC | | | | |
| 496089 | 1853 | 1869 | AGAGAAACT | 0 | 41824 | 41840 | 1144 |
| | | | GGTCCTGC | | | | |
| 496090 | 1854 | 1870 | CAGAGAAAC | 0 | 41825 | 41841 | 1145 |
| | | | TGGTCCTG | | | | |
| 496091 | 1855 | 1871 | GCAGAGAAA | 42 | 41826 | 41842 | 1146 |
| | | | CTGGTCCT | | | | |
| 496092 | 2123 | 2139 | CATGTCATC | 52 | 42094 | 42110 | 1147 |
| | | | AGCCACCC | | | | |
| 496093 | 2124 | 2140 | CCATGTCAT | 62 | 42095 | 42111 | 1148 |
| | | | CAGCCACC | | | | |
| 496094 | 2125 | 2141 | TCCATGTCA | 60 | 42096 | 42112 | 1149 |
| | | | TCAGCCAC | | | | |
| 496095 | 2134 | 2150 | TGTGCTGCA | 53 | 42105 | 42121 | 1150 |
| | | | TCCATGTC | | | | |
| 496096 | 2135 | 2151 | CTGTGCTGC | 21 | 42106 | 42122 | 1151 |
| | | | ATCCATGT | | | | |
| 496097 | 2136 | 2152 | TCTGTGCTG | 33 | 42107 | 42123 | 1152 |
| | | | CATCCATG | | | | |
| 496098 | 2140 | 2156 | TGAGTCTGT | 60 | 42111 | 42127 | 1153 |
| | | | GCTGCATC | | | | |
| 496099 | 2141 | 2157 | CTGAGTCTG | 58 | 42112 | 42128 | 1154 |
| | | | TGCTGCAT | | | | |
| 496100 | 2142 | 2158 | GCTGAGTCT | 72 | 42113 | 42129 | 1155 |
| | | | GTGCTGCA | | | | |
| 496101 | 2305 | 2321 | CACAGAAAA | 53 | 42276 | 42292 | 1156 |
| | | | GTGAGGCT | | | | |
| 496102 | 2306 | 2322 | GCACAGAAA | 49 | 42277 | 42293 | 1157 |
| | | | AGTGAGGC | | | | |
| 496103 | 2307 | 2323 | GGCACAGAA | 28 | 42278 | 42294 | 1158 |
| | | | AAGTGAGG | | | | |
| 496104 | 2398 | 2414 | AAAGTCTGA | 65 | 42369 | 42385 | 1159 |
| | | | CATGGTGC | | | | |
| 496105 | 2399 | 2415 | AAAAGTCTG | 54 | 42370 | 42386 | 1160 |
| | | | ACATGGTG | | | | |
| 496106 | 2400 | 2416 | CAAAAGTCT | 39 | 42371 | 42387 | 1161 |
| | | | GACATGGT | | | | |
| 496036 | 474 | 490 | GACCCACTG | 49 | 25600 | 25616 | 1091 |
| | | | GAGCACTG | | | | |
| 496037 | 475 | 491 | GGACCCACT | 76 | 25601 | 25617 | 1092 |
| | | | GGAGCACT | | | | |
| 496038 | 476 | 492 | AGGACCCAC | 72 | 25602 | 25618 | 1093 |
| | | | TGGAGCAC | | | | |
| 496039 | 553 | 569 | CAGCGATGA | 67 | 31120 | 31136 | 1094 |
| | | | GCCAGCAA | | | | |
| 496040 | 554 | 570 | ACAGCGATG | 67 | 31121 | 31137 | 1095 |
| | | | AGCCAGCA | | | | |
| 496041 | 555 | 571 | CACAGCGAT | 78 | 31122 | 31138 | 1096 |
| | | | GAGCCAGC | | | | |
| 496042 | 556 | 572 | GCACAGCGA | 61 | 31123 | 31139 | 1097 |
| | | | TGAGCCAG | | | | |
| 496043 | 557 | 573 | AGCACAGCG | 70 | 31124 | 31140 | 1098 |
| | | | ATGAGCCA | | | | |
| 496044 | 558 | 574 | GAGCACAGC | 48 | 31125 | 31141 | 1099 |
| | | | GATGAGCC | | | | |
| 496045 | 998 | 1014 | TTCTTGCCA | 39 | 38151 | 38167 | 1100 |
| | | | GGCATGGA | | | | |
| 496046 | 999 | 1015 | ATTCTTGCC | 31 | 38152 | 38168 | 1101 |
| | | | AGGCATGG | | | | |
| 413433 | n/a | n/a | GCCTGGACA | 68 | 32431 | 32450 | 425 |
| | | | AGTCCTGC | | | | |
| | | | CCA | | | | |
| 496107 | n/a | n/a | CAGGGCCCT | 34 | 10044 | 10060 | 1085 |
| | | | TTCCAGAA | | | | |
| 496108 | n/a | n/a | ACAGGGCCC | 39 | 10045 | 10061 | 1086 |
| | | | TTTCCAGA | | | | |
| 496109 | n/a | n/a | CACAGGGCC | 39 | 10046 | 10062 | 1087 |
| | | | CTTTCCAG | | | | |
| 496110 | n/a | n/a | CGAATATCC | 14 | 10210 | 10226 | 1088 |
| | | | CTAATAAC | | | | |
| 496111 | n/a | n/a | TCGAATATC | 9 | 10211 | 10227 | 1089 |
| | | | CCTAATAA | | | | |
| 496112 | n/a | n/a | CTCGAATAT | 17 | 10212 | 10228 | 1090 |
| | | | CCCTAATA | | | | |

TABLE 20
Inhibition of DGAT2 mRNA by 5-10-5 MOE
gapmers targeting SEQ ID NO: 2

| ISIS | SEQ ID NO: 2 | SEQ ID NO: 2 | | % | SEQ |
|---|---|---|---|---|---|
| NO | Start Site | Stop Site | Sequence | inhibition | ID NO |
| 483876 | 14332 | 14351 | GTGAGATCCCCAGAGAGGAA | 26 | 1162 |
| 483877 | 14337 | 14356 | AAGGAGTGAGATCCCCAGAG | 34 | 1163 |
| 483878 | 14360 | 14379 | TTCTGACCCTATTTTCCAGA | 52 | 1164 |
| 483879 | 14385 | 14404 | CCCTCCATCCTTGAGAATCT | 76 | 1165 |
| 483880 | 14427 | 14446 | ATGTCACAAGTTCACAAACA | 49 | 1166 |
| 483881 | 14432 | 14451 | CATGAATGTCACAAGTTCAC | 38 | 1167 |
| 483882 | 14437 | 14456 | ACTAACATGAATGTCACAAG | 35 | 1168 |
| 483883 | 14442 | 14461 | CAAGGACTAACATGAATGTC | 0 | 1169 |
| 483884 | 14447 | 14466 | AATGACAAGGACTAACATGA | 24 | 1170 |
| 483885 | 14452 | 14471 | GGACAAATGACAAGGACTAA | 12 | 1171 |
| 483886 | 14457 | 14476 | ACACAGGACAAATGACAAGG | 62 | 1172 |
| 483887 | 14462 | 14481 | GTGTAACACAGGACAAATGA | 82 | 1173 |
| 483888 | 14467 | 14486 | TGAATGTGTAACACAGGACA | 75 | 1174 |
| 483889 | 14503 | 14522 | CAGGGTCTGCCACTCTCTAC | 88 | 1175 |
| 483890 | 14508 | 14527 | TAGAGCAGGGTCTGCCACTC | 85 | 1176 |
| 483891 | 14532 | 14551 | TCAGTGAAGCCTTCCTGGAT | 31 | 1177 |
| 483892 | 14537 | 14556 | CTTCCTCAGTGAAGCCTTCC | 72 | 1178 |
| 483893 | 14542 | 14561 | AGTCCCTTCCTCAGTGAAGC | 59 | 1179 |
| 483894 | 14547 | 14566 | CCCCAAGTCCCTTCCTCAGT | 51 | 1180 |
| 483895 | 14648 | 14667 | CACAGTCATCTTGTGTACAT | 93 | 1181 |
| 483896 | 14653 | 14672 | CTCTGCACAGTCATCTTGTG | 59 | 1182 |
| 483897 | 14658 | 14677 | GATCACTCTGCACAGTCATC | 83 | 1183 |
| 483898 | 14663 | 14682 | GCTCAGATCACTCTGCACAG | 94 | 1184 |
| 483899 | 14668 | 14687 | TCATTGCTCAGATCACTCTG | 71 | 1185 |
| 483900 | 14673 | 14692 | TCCTGTCATTGCTCAGATCA | 81 | 1186 |
| 483901 | 14678 | 14697 | GTCTTTCCTGTCATTGCTCA | 86 | 1187 |
| 483902 | 14715 | 14734 | TCAGGGTGATCAAGCTCCCC | 70 | 1188 |
| 483903 | 14720 | 14739 | TGACCTCAGGGTGATCAAGC | 75 | 1189 |
| 483904 | 14725 | 14744 | TTCCCTGACCTCAGGGTGAT | 49 | 1190 |
| 483905 | 14730 | 14749 | AAGACTTCCCTGACCTCAGG | 46 | 1191 |
| 483906 | 14735 | 14754 | CCAGGAAGACTTCCCTGACC | 65 | 1192 |
| 483907 | 14740 | 14759 | CTCTTCCAGGAAGACTTCCC | 68 | 1193 |
| 483908 | 14745 | 14764 | GTCACCTCTTCCAGGAAGAC | 94 | 1194 |
| 483909 | 14750 | 14769 | TGAATGTCACCTCTTCCAGG | 84 | 1195 |
| 483910 | 14755 | 14774 | CGGACTGAATGTCACCTCTT | 95 | 1196 |
| 483911 | 14760 | 14779 | AGATCCGGACTGAATGTCAC | 79 | 1197 |
| 483912 | 14765 | 14784 | TTTCCAGATCCGGACTGAAT | 79 | 1198 |
| 483913 | 14770 | 14789 | TCATCTTTCCAGATCCGGAC | 95 | 1199 |
| 483914 | 14775 | 14794 | TCTATTCATCTTTCCAGATC | 55 | 1200 |
| 483915 | 14802 | 14821 | TGAATGTTCTTGCCTGTCTT | 48 | 1201 |
| 483916 | 14807 | 14826 | GTACCTGAATGTTCTTGCCT | 85 | 1202 |
| 483917 | 14812 | 14831 | TTCCTGTACCTGAATGTTCT | 71 | 1203 |
| 483918 | 14852 | 14871 | TGCCTCTCCCATCCAAATCT | 75 | 1204 |
| 483919 | 14882 | 14901 | GTTGGTCACTCAGAGGCCCT | 86 | 1205 |
| 483920 | 14953 | 14972 | ACAGGCCTGGATCCAGCATC | 77 | 1206 |
| 483921 | 14986 | 15005 | TCTTCCTCCTGCTGCAGACA | 86 | 1207 |
| 483922 | 14991 | 15010 | TCAAGTCTTCCTCCTGCTGC | 68 | 1208 |
| 483923 | 14996 | 15015 | AGCTCTCAAGTCTTCCTCCT | 87 | 1209 |
| 483924 | 15001 | 15020 | CCATGAGCTCTCAAGTCTTC | 82 | 1210 |
| 483925 | 15006 | 15025 | CTTTCCCATGAGCTCTCAAG | 68 | 1211 |
| 483926 | 15011 | 15030 | GGCTCCTTTCCCATGAGCTC | 77 | 1212 |
| 483927 | 15016 | 15035 | CACCAGGCTCCTTTCCCATG | 84 | 1213 |
| 483928 | 15021 | 15040 | AACTGCACCAGGCTCCTTTC | 70 | 1214 |
| 483929 | 15026 | 15045 | AAACTAACTGCACCAGGCTC | 65 | 1215 |
| 483930 | 15031 | 15050 | CCAATAAACTAACTGCACCA | 36 | 1216 |
| 483931 | 15036 | 15055 | GGAGGCCAATAAACTAACTG | 37 | 1217 |
| 483932 | 15041 | 15060 | GTGCTGGAGGCCAATAAACT | 60 | 1218 |
| 483933 | 15046 | 15065 | TCAAAGTGCTGGAGGCCAAT | 66 | 1219 |
| 483934 | 15073 | 15092 | AGCCAGCAGCTCCATACCAG | 70 | 1220 |
| 483935 | 15078 | 15097 | AAATCAGCCAGCAGCTCCAT | 56 | 1221 |
| 483936 | 15083 | 15102 | CCCTCAAATCAGCCAGCAGC | 62 | 1222 |
| 483937 | 15088 | 15107 | TGAGGCCCTCAAATCAGCCA | 52 | 1223 |
| 483938 | 15093 | 15112 | GCCCATGAGGCCCTCAAATC | 44 | 1224 |
| 483939 | 15098 | 15117 | GCCCTGCCCATGAGGCCCTC | 44 | 1225 |
| 483940 | 15103 | 15122 | CCTGGGCCCTGCCCATGAGG | 28 | 1226 |
| 483941 | 15144 | 15163 | GCCAAGCAGGAGCTGGACAG | 35 | 1227 |
| 483942 | 15178 | 15197 | TAGTGGCTTGCTGAGGCTGC | 67 | 1228 |
| 483943 | 15183 | 15202 | AAGGGTAGTGGCTTGCTGAG | 31 | 1229 |
| 483944 | 15188 | 15207 | TAAGGAAGGGTAGTGGCTTG | 5 | 1230 |
| 483945 | 15199 | 15218 | GAGACTGAGGGTAAGGAAGG | 31 | 1231 |
| 483946 | 15204 | 15223 | ATGAGGAGACTGAGGGTAAG | 41 | 1232 |
| 483947 | 15209 | 15228 | CATAGATGAGGAGACTGAGG | 42 | 1233 |
| 483948 | 15214 | 15233 | CATTTCATAGATGAGGAGAC | 71 | 1234 |
| 483949 | 15219 | 15238 | TTGCTCATTTCATAGATGAG | 78 | 1235 |
| 483950 | 15224 | 15243 | CACTTTTGCTCATTTCATAG | 74 | 1236 |
| 483951 | 15247 | 15266 | ATAATCTGCACAGGTTCTTA | 47 | 1237 |
| 483952 | 15252 | 15271 | GCACCATAATCTGCACAGGT | 92 | 1238 |
| 413433 | 32431 | 32450 | GCCTGGACAAGTCCTGCCCA | 87 | 425 |

TABLE 21
Inhibition of DGAT2 mRNA by 5-10-5 MOE
gapmers targeting SEQ ID NO: 2

| ISIS | SEQ ID NO: 2 | SEQ ID NO: 2 | | % | SEQ |
|---|---|---|---|---|---|
| NO | Start Site | Stop Site | Sequence | inhibition | ID NO |
| 483953 | 17938 | 17957 | GGGTCTAGGTGAGTGAGAAA | 42 | 1239 |
| 483954 | 17960 | 17979 | ATCTGGACCTAATGTCTGCC | 71 | 1240 |
| 483955 | 17965 | 17984 | GGCCCATCTGGACCTAATGT | 41 | 1241 |
| 483956 | 17970 | 17989 | ACCTGGGCCCATCTGGACCT | 61 | 1242 |
| 483957 | 18042 | 18061 | CTCTTGGGCTCCTTGAGGCA | 33 | 1243 |
| 483958 | 18047 | 18066 | ACAGCCTCTTGGGCTCCTTG | 33 | 1244 |
| 483959 | 18052 | 18071 | TGTGAACAGCCTCTTGGGCT | 49 | 1245 |
| 483960 | 18057 | 18076 | AGAGGTGTGAACAGCCTCTT | 0 | 1246 |
| 483961 | 18078 | 18097 | GCCAGAAAGATGCCAGCTAA | 67 | 1247 |
| 483962 | 18083 | 18102 | AGAGAGCCAGAAAGATGCCA | 57 | 1248 |
| 483963 | 18113 | 18132 | AAAAGGGCCAGAATGTCTGG | 24 | 1249 |
| 483964 | 18136 | 18155 | TAAGGAATCTAAATAACTTA | 21 | 1250 |
| 483965 | 18141 | 18160 | TGTCATAAGGAATCTAAATA | 16 | 1251 |
| 483966 | 18146 | 18165 | AGGATTGTCATAAGGAATCT | 54 | 1252 |
| 483967 | 18151 | 18170 | AATCCAGGATTGTCATAAGG | 59 | 1253 |
| 483968 | 18156 | 18175 | GCTTTAATCCAGGATTGTCA | 80 | 1254 |
| 483969 | 18161 | 18180 | CCTTAGCTTTAATCCAGGAT | 86 | 1255 |
| 483970 | 18166 | 18185 | GTCCTCCTTAGCTTTAATCC | 80 | 1256 |
| 483971 | 18171 | 18190 | TCAGTGTCCTCCTTAGCTTT | 65 | 1257 |
| 483972 | 18176 | 18195 | GGGACTCAGTGTCCTCCTTA | 81 | 1258 |
| 483973 | 18181 | 18200 | TCCCTGGGACTCAGTGTCCT | 77 | 1259 |
| 483974 | 18220 | 18239 | GATTCTTACCTGCAATGAGA | 36 | 1260 |
| 483975 | 18225 | 18244 | GCTCTGATTCTTACCTGCAA | 70 | 1261 |
| 483976 | 18230 | 18249 | CCCTGGCTCTGATTCTTACC | 60 | 1262 |
| 483977 | 18235 | 18254 | TCAAACCCTGGCTCTGATTC | 70 | 1263 |
| 483978 | 18240 | 18259 | AGGATTCAAACCCTGGCTCT | 72 | 1264 |
| 483979 | 18286 | 18305 | ATGCCTGCCCTGCCTAGGAA | 75 | 1265 |
| 483980 | 18291 | 18310 | AAATAATGCCTGCCCTGCCT | 37 | 1266 |
| 483981 | 18296 | 18315 | GGGTAAAATAATGCCTGCCC | 65 | 1267 |
| 483982 | 18301 | 18320 | TTGATGGGTAAAATAATGCC | 9 | 1268 |
| 483983 | 18306 | 18325 | CCTGTTTGATGGGTAAAATA | 60 | 1269 |
| 483984 | 18311 | 18330 | CCTCTCCTGTTTGATGGGTA | 89 | 1270 |
| 483985 | 18316 | 18335 | GGTGTCCTCTCCTGTTTGAT | 78 | 1271 |
| 483986 | 18321 | 18340 | GCCTCGGTGTCCTCTCCTGT | 84 | 1272 |
| 483987 | 18326 | 18345 | AGTAAGCCTCGGTGTCCTCT | 87 | 1273 |
| 483988 | 18331 | 18350 | TACCAAGTAAGCCTCGGTGT | 87 | 1274 |
| 483989 | 18336 | 18355 | TTAATTACCAAGTAAGCCTC | 74 | 1275 |
| 483990 | 18369 | 18388 | TTCATAAAAAGTAAAGATCT | 51 | 1276 |
| 483991 | 18374 | 18393 | AGAGCTTCATAAAAAGTAAA | 0 | 1277 |
| 483992 | 18379 | 18398 | AGCCAAGAGCTTCATAAAAA | 87 | 1278 |
| 483993 | 18417 | 18436 | TCACCAGATTGTTGTGGGAA | 84 | 1279 |
| 483994 | 18422 | 18441 | CTACCTCACCAGATTGTTGT | 75 | 1280 |
| 483995 | 18427 | 18446 | AATACCTACCTCACCAGATT | 63 | 1281 |
| 483996 | 18432 | 18451 | GGGCTAATACCTACCTCACC | 81 | 1282 |
| 483997 | 18450 | 18469 | TTCCTCATCTATACAGTGGG | 85 | 1283 |
| 483998 | 18455 | 18474 | TCAGCTTCCTCATCTATACA | 52 | 1284 |
| 483999 | 18460 | 18479 | AAGCTTCAGCTTCCTCATCT | 35 | 1285 |
| 484000 | 18465 | 18484 | TATACAAGCTTCAGCTTCCT | 44 | 1286 |
| 484001 | 18470 | 18489 | CTTCCTATACAAGCTTCAGC | 77 | 1287 |
| 484002 | 18475 | 18494 | AGTCACTTCCTATACAAGCT | 64 | 1288 |
| 484003 | 18513 | 18532 | AGAACCTGGCCTCTAACTCG | 42 | 1289 |
| 484004 | 18581 | 18600 | CATACTGGCATCTGGCAGGG | 84 | 1290 |
| 484005 | 18586 | 18605 | ACCTCCATACTGGCATCTGG | 66 | 1291 |
| 484006 | 18591 | 18610 | ACCTCACCTCCATACTGGCA | 79 | 1292 |
| 484007 | 18747 | 18766 | ATGAAGAAAAATAATTTGGG | 0 | 1293 |
| 484008 | 18821 | 18840 | TTAACTTCTGCTGAGGGAGA | 63 | 1294 |
| 484009 | 18826 | 18845 | GATGCTTAACTTCTGCTGAG | 68 | 1295 |
| 484010 | 18831 | 18850 | GTTAGGATGCTTAACTTCTG | 78 | 1296 |
| 484011 | 18836 | 18855 | GTTAAGTTAGGATGCTTAAC | 65 | 1297 |
| 484012 | 18869 | 18888 | ATAGGCCTGGATGCCCAAGT | 78 | 1298 |
| | 20779 | 20798 | | | |
| 484013 | 18880 | 18899 | CAGAGGCAGCTATAGGCCTG | 69 | 1299 |
| | 20790 | 20809 | | | |
| 484014 | 18885 | 18904 | TGCCTCAGAGGCAGCTATAG | 30 | 1300 |
| 484015 | 18890 | 18909 | TGTCCTGCCTCAGAGGCAGC | 65 | 1301 |
| 484016 | 18895 | 18914 | GATGATGTCCTGCCTCAGAG | 61 | 1302 |
| 484017 | 18900 | 18919 | CAGCAGATGATGTCCTGCCT | 85 | 1303 |
| 484018 | 18982 | 19001 | GGGACAGAGCTAAGACCCAA | 58 | 1304 |
| 484019 | 19013 | 19032 | GTCAAAGGTGGCTTCCTGGG | 74 | 1305 |
| 484020 | 19018 | 19037 | GAGTAGTCAAAGGTGGCTTC | 78 | 1306 |
| 484021 | 19023 | 19042 | GGAATGAGTAGTCAAAGGTG | 27 | 1307 |
| 484022 | 19028 | 19047 | AAGTTGGAATGAGTAGTCAA | 14 | 1308 |
| 484023 | 19041 | 19060 | GCTGAGAATAAAGAAGTTGG | 55 | 1309 |
| 484024 | 19046 | 19065 | TAGAAGCTGAGAATAAAGAA | 36 | 1310 |
| 484025 | 19051 | 19070 | TGAAATAGAAGCTGAGAATA | 20 | 1311 |
| 484026 | 19112 | 19131 | GGAGTTCTAATGAGGCAGAC | 50 | 1312 |
| 484027 | 19117 | 19136 | TGCAGGGAGTTCTAATGAGG | 53 | 1313 |
| 484028 | 19122 | 19141 | AGCCTTGCAGGGAGTTCTAA | 62 | 1314 |
| 484029 | 19127 | 19146 | AACAAAGCCTTGCAGGGAGT | 30 | 1315 |
| 413433 | 32431 | 32450 | GCCTGGACAAGTCCTGCCCA | 76 | 425 |

TABLE 22
Inhibition of DGAT2 mRNA by 5-10-5 MOE
gapmers targeting SEQ ID NO: 2

| ISIS | SEQ ID NO: 2 | SEQ ID NO: 2 | | % | SEQ |
|---|---|---|---|---|---|
| NO | Start Site | Stop Site | Sequence | inhibition | ID NO |
| 484030 | 22439 | 22458 | ATGGCAAGTGCTTCCGTGGG | 79 | 1316 |
| 484031 | 22444 | 22463 | ACCAAATGGCAAGTGCTTCC | 82 | 1317 |
| 484032 | 22449 | 22468 | CAAATACCAAATGGCAAGTG | 34 | 1318 |
| 484033 | 22474 | 22493 | CTGCAAGGTGGTGAGCTCTA | 28 | 1319 |
| 484034 | 22513 | 22532 | CCTCACTTCCCATCTGCCTG | 24 | 1320 |
| 484035 | 22518 | 22537 | TGAACCCTCACTTCCCATCT | 14 | 1321 |
| 484036 | 22523 | 22542 | CCAAGTGAACCCTCACTTCC | 12 | 1322 |
| 484037 | 22528 | 22547 | GTCTACCAAGTGAACCCTCA | 20 | 1323 |
| 484038 | 22533 | 22552 | ATGCAGTCTACCAAGTGAAC | 39 | 1324 |
| 484039 | 22538 | 22557 | GGGAAATGCAGTCTACCAAG | 55 | 1325 |
| 484040 | 22543 | 22562 | CAAGTGGGAAATGCAGTCTA | 53 | 1326 |
| 484041 | 22548 | 22567 | GCCAACAAGTGGGAAATGCA | 85 | 1327 |
| 484042 | 22573 | 22592 | CCAACTACCGCCCACAGCTC | 43 | 1328 |
| 484043 | 22578 | 22597 | CAGCCCCAACTACCGCCCAC | 29 | 1329 |
| 484044 | 22583 | 22602 | TTATCCAGCCCCAACTACCG | 10 | 1330 |
| 484045 | 22588 | 22607 | CTGCCTTATCCAGCCCCAAC | 43 | 1331 |
| 484046 | 22593 | 22612 | TCACCCTGCCTTATCCAGCC | 51 | 1332 |
| 484047 | 22713 | 22732 | TCTTGTTCAACCCTCACCCC | 45 | 1333 |
| 484048 | 22766 | 22785 | CTTATTAGGTGTCTTAAAAT | 43 | 1334 |
| 484049 | 22771 | 22790 | CTAAGCTTATTAGGTGTCTT | 85 | 1335 |
| 484050 | 22776 | 22795 | CTCTGCTAAGCTTATTAGGT | 69 | 1336 |
| 484051 | 22820 | 22839 | ACTGAGAAGACCTAAAAATT | 0 | 1337 |
| 484052 | 22825 | 22844 | AAACAACTGAGAAGACCTAA | 45 | 1338 |
| 484053 | 22830 | 22849 | AACTGAAACAACTGAGAAGA | 32 | 1339 |
| 484054 | 22835 | 22854 | TCCCCAACTGAAACAACTGA | 65 | 1340 |
| 484055 | 22841 | 22860 | GACATATCCCCAACTGAAAC | 67 | 1341 |
| 484056 | 22846 | 22865 | CTGATGACATATCCCCAACT | 71 | 1342 |
| 484057 | 22851 | 22870 | TTTCACTGATGACATATCCC | 69 | 1343 |
| 484058 | 22856 | 22875 | AGAAATTTCACTGATGACAT | 56 | 1344 |
| 484059 | 22861 | 22880 | AGTATAGAAATTTCACTGAT | 18 | 1345 |
| 484060 | 22866 | 22885 | GGAGGAGTATAGAAATTTCA | 53 | 1346 |
| 484061 | 22871 | 22890 | TTGGAGGAGGAGTATAGAAA | 48 | 1347 |
| 484062 | 22876 | 22895 | GCAGCTTGGAGGAGGAGTAT | 32 | 1348 |
| 484063 | 22881 | 22900 | CCCATGCAGCTTGGAGGAGG | 68 | 1349 |
| 484064 | 22886 | 22905 | CAGCCCCCATGCAGCTTGGA | 84 | 1350 |
| 484065 | 22891 | 22910 | AGGGCCAGCCCCCATGCAGC | 67 | 1351 |
| 484066 | 22916 | 22935 | TTATCTAGCTCCCTACCTTG | 57 | 1352 |
| 484067 | 22968 | 22987 | TGAAGCCAGTGGTTTGAGGG | 30 | 1353 |
| 484068 | 22992 | 23011 | TGCTTCCCGTTGCAGACAGG | 34 | 1354 |
| 484069 | 23095 | 23114 | GTCCAAACACTCAGGTAGGG | 72 | 1355 |
| 484070 | 23100 | 23119 | CTTCAGTCCAAACACTCAGG | 85 | 1356 |
| 484071 | 23128 | 23147 | TTAAGTCTGAGAAACACCAC | 77 | 1357 |
| 484072 | 23133 | 23152 | GGTGATTAAGTCTGAGAAAC | 64 | 1358 |
| 484073 | 23138 | 23157 | CCCCAGGTGATTAAGTCTGA | 73 | 1359 |
| 484074 | 23143 | 23162 | AAGATCCCCAGGTGATTAAG | 26 | 1360 |
| 484075 | 23148 | 23167 | TTAACAAGATCCCCAGGTGA | 22 | 1361 |
| 484076 | 23154 | 23173 | TGCATTTTAACAAGATCCCC | 0 | 1362 |
| 484077 | 23159 | 23178 | AAATCTGCATTTTAACAAGA | 20 | 1363 |
| 484078 | 23164 | 23183 | AATCAAAATCTGCATTTTAA | 40 | 1364 |
| 484079 | 23169 | 23188 | TACTGAATCAAAATCTGCAT | 53 | 1365 |
| 484080 | 23174 | 23193 | GGATTTACTGAATCAAAATC | 31 | 1366 |
| 484081 | 23179 | 23198 | AGACTGGATTTACTGAATCA | 65 | 1367 |
| 484082 | 23184 | 23203 | GCTCCAGACTGGATTTACTG | 72 | 1368 |
| 484083 | 23232 | 23251 | AGCAGCATCAGCATCACCTG | 79 | 1369 |
| 484084 | 23237 | 23256 | GGAACAGCAGCATCAGCATC | 39 | 1370 |
| 484085 | 23242 | 23261 | GTCTGGGAACAGCAGCATCA | 90 | 1371 |
| 484086 | 23271 | 23290 | TACTCTAGCACTTTCCTACT | 53 | 1372 |
| 484087 | 23276 | 23295 | AAATGTACTCTAGCACTTTC | 41 | 1373 |
| 484088 | 23281 | 23300 | AGACAAAATGTACTCTAGCA | 58 | 1374 |
| 484089 | 23305 | 23324 | GGCTGGATGCCCTGGCTAGA | 79 | 1375 |
| 484090 | 23310 | 23329 | AGGCAGGCTGGATGCCCTGG | 55 | 1376 |
| 484091 | 23315 | 23334 | ATCTGAGGCAGGCTGGATGC | 59 | 1377 |
| 484092 | 23417 | 23436 | ATCTTCCAGCAGCTGGCTCT | 28 | 1378 |
| 484093 | 23422 | 23441 | AAGTCATCTTCCAGCAGCTG | 41 | 1379 |
| 484094 | 23427 | 23446 | TGGACAAGTCATCTTCCAGC | 85 | 1380 |
| 484095 | 23470 | 23489 | AAGTCCAAGCACAGGCTTGA | 44 | 1381 |
| 484096 | 23475 | 23494 | AAGTGAAGTCCAAGCACAGG | 39 | 1382 |
| 484097 | 23480 | 23499 | GAGGGAAGTGAAGTCCAAGC | 63 | 1383 |
| 484098 | 23547 | 23566 | TCCTTGAGGGTCTCATAACC | 66 | 1384 |
| 484099 | 23552 | 23571 | GCTTATCCTTGAGGGTCTCA | 84 | 1385 |
| 484100 | 23557 | 23576 | CACATGCTTATCCTTGAGGG | 82 | 1386 |
| 484101 | 23562 | 23581 | TTCATCACATGCTTATCCTT | 75 | 1387 |
| 484102 | 23567 | 23586 | ATGAGTTCATCACATGCTTA | 78 | 1388 |
| 484103 | 23597 | 23616 | TCAACCTGCCCAGCAGTGGG | 62 | 1389 |
| 484104 | 23641 | 23660 | CTCTGTACACAGGACACAGT | 70 | 1390 |
| 484105 | 23646 | 23665 | AAAGGCTCTGTACACAGGAC | 79 | 1391 |
| 484106 | 23651 | 23670 | AGTGCAAAGGCTCTGTACAC | 66 | 1392 |
| 413433 | 32431 | 32450 | GCCTGGACAAGTCCTGCCCA | 86 | 425 |

TABLE 23
Inhibition of DGAT2 mRNA by 5-10-5 MOE gapmers targeting SEQ ID NO: 2

| ISIS | SEQ ID NO: 2 | SEQ ID NO: 2 | | % | Unmodified | Modified |
|---|---|---|---|---|---|---|
| NO | Start Site | Stop Site | Sequence | inhibition | SEQ ID NO | SEQ ID NO |
| 413433 | 32431 | 32450 | GCCTGGACAAGTCCTGCCCA | 84 | 425 | N/A |
| 484107 | 26390 | 26409 | GGCAACCTAAGGAGTGAGGG | 71 | 1393 | N/A |
| 484108 | 26395 | 26414 | TGGATGGCAACCTAAGGAGT | 40 | 1394 | N/A |
| 484109 | 26400 | 26419 | TGGCCTGGATGGCAACCTAA | 57 | 1395 | N/A |
| 484110 | 26479 | 26498 | GCTATGCTGAGAGCACAGGG | 79 | 1396 | N/A |
| 484111 | 26484 | 26503 | TACCTGCTATGCTGAGAGCA | 71 | 1397 | N/A |
| 484112 | 26489 | 26508 | GAAGCTACCTGCTATGCTGA | 46 | 1398 | N/A |
| 484113 | 26494 | 26513 | CTGAGGAAGCTACCTGCTAT | 36 | 1399 | N/A |
| 484114 | 26516 | 26535 | CAGGTTCATCTGCCTTGACG | 70 | 1400 | N/A |
| 484115 | 26521 | 26540 | TGGAGCAGGTTCATCTGCCT | 83 | 1401 | N/A |
| 484116 | 26526 | 26545 | TGCTCTGGAGCAGGTTCATC | 81 | 1402 | N/A |
| 484117 | 26531 | 26550 | TGTGATGCTCTGGAGCAGGT | 80 | 1403 | N/A |
| 484118 | 26536 | 26555 | CACTCTGTGATGCTCTGGAG | 74 | 1404 | N/A |
| 484119 | 26541 | 26560 | GAATGCACTCTGTGATGCTC | 68 | 1405 | N/A |
| 484120 | 26566 | 26585 | CAGAGGGACTGGCTCACAGG | 21 | 1406 | N/A |
| 484121 | 26590 | 26609 | TACAGTCCCGAAGAGTGGGT | 38 | 1407 | N/A |
| 484122 | 26595 | 26614 | GCCTATACAGTCCCGAAGAG | 51 | 1408 | N/A |
| 484123 | 26600 | 26619 | TACCAGCCTATACAGTCCCG | 60 | 1409 | N/A |
| 484124 | 26605 | 26624 | TCCCCTACCAGCCTATACAG | 59 | 1410 | N/A |
| 484125 | 26610 | 26629 | GATGATCCCCTACCAGCCTA | 68 | 1411 | N/A |
| 484126 | 26615 | 26634 | GTCCTGATGATCCCCTACCA | 80 | 1412 | N/A |
| 484127 | 26620 | 26639 | GGTAAGTCCTGATGATCCCC | 86 | 1413 | N/A |
| 484128 | 26625 | 26644 | GACATGGTAAGTCCTGATGA | 54 | 1414 | N/A |
| 484129 | 26630 | 26649 | GCACTGACATGGTAAGTCCT | 87 | 1415 | N/A |
| 484130 | 26635 | 26654 | GCTCAGCACTGACATGGTAA | 85 | 1416 | N/A |
| 484131 | 26640 | 26659 | CAGCTGCTCAGCACTGACAT | 80 | 1417 | N/A |
| 484132 | 26645 | 26664 | AAGGACAGCTGCTCAGCACT | 60 | 1418 | N/A |
| 484133 | 26711 | 26730 | GTGAAGTTCTATCCCTTGGC | 89 | 1419 | N/A |
| 484134 | 26716 | 26735 | CACCTGTGAAGTTCTATCCC | 69 | 1420 | N/A |
| 484135 | 26721 | 26740 | TTTCTCACCTGTGAAGTTCT | 79 | 1421 | N/A |
| 484136 | 26755 | 26774 | AGCAGGTAGTTGATGAACCT | 70 | 1422 | N/A |
| 484137 | 26778 | 26797 | TGCCATTTAATGAGCTTCAC | 86 | 1423 | 4680 |
| 484138 | 26783 | 26802 | AACTCTGCCATTTAATGAGC | 55 | 1424 | N/A |
| 484139 | 26788 | 26807 | ATCCCAACTCTGCCATTTAA | 81 | 1425 | N/A |
| 484140 | 26811 | 26830 | GAATGCACTGAGTTTCTGCT | 89 | 1426 | N/A |
| 484141 | 26849 | 26868 | CACTAATTCTGGGCTTCCAG | 87 | 1427 | N/A |
| 484142 | 26854 | 26873 | CAGTTCACTAATTCTGGGCT | 79 | 1428 | N/A |
| 484143 | 26859 | 26878 | AGCCCCAGTTCACTAATTCT | 52 | 1429 | N/A |
| 484144 | 26864 | 26883 | GTTTCAGCCCCAGTTCACTA | 54 | 1430 | N/A |
| 484145 | 26869 | 26888 | TGGCTGTTTCAGCCCCAGTT | 70 | 1431 | N/A |
| 484146 | 26874 | 26893 | AAGACTGGCTGTTTCAGCCC | 79 | 1432 | N/A |
| 484147 | 26879 | 26898 | AGGTGAAGACTGGCTGTTTC | 76 | 1433 | N/A |
| 484148 | 26884 | 26903 | CCTAAAGGTGAAGACTGGCT | 91 | 1434 | N/A |
| 484149 | 26889 | 26908 | TTGGGCCTAAAGGTGAAGAC | 64 | 1435 | N/A |
| 484150 | 26894 | 26913 | CGTTCTTGGGCCTAAAGGTG | 57 | 1436 | N/A |
| 484151 | 26899 | 26918 | AAGCCCGTTCTTGGGCCTAA | 23 | 1437 | N/A |
| 484152 | 26926 | 26945 | TTAAGGGTTCATGGATCCCC | 66 | 1438 | N/A |
| 484153 | 26931 | 26950 | TAATTTTAAGGGTTCATGGA | 29 | 1439 | N/A |
| 484154 | 27005 | 27024 | CTGTAAGACTTTGAGGACAG | 60 | 1440 | N/A |
| 484155 | 27010 | 27029 | TGTCCCTGTAAGACTTTGAG | 43 | 1441 | N/A |
| 484156 | 27046 | 27065 | GTTCTTCCAACCAGTGTTTG | 84 | 1442 | N/A |
| 484157 | 27051 | 27070 | GCTCAGTTCTTCCAACCAGT | 94 | 1443 | N/A |
| 484158 | 27056 | 27075 | AGTTTGCTCAGTTCTTCCAA | 85 | 1444 | N/A |
| 484159 | 27061 | 27080 | TGTTTAGTTTGCTCAGTTCT | 68 | 1445 | N/A |
| 484160 | 27101 | 27120 | AAATGCAAGCCATGTTAGGG | 54 | 1446 | N/A |
| 484161 | 27106 | 27125 | TGGCCAAATGCAAGCCATGT | 72 | 1447 | N/A |
| 484162 | 27111 | 27130 | GTAAGTGGCCAAATGCAAGC | 67 | 1448 | N/A |
| 484163 | 27116 | 27135 | TTCTAGTAAGTGGCCAAATG | 57 | 1449 | N/A |
| 484164 | 27174 | 27193 | CAGGCCTCCACTTCCTTTTT | 66 | 1450 | N/A |
| 484165 | 27211 | 27230 | TCTTCTCATGTGACCCCAAG | 69 | 1451 | N/A |
| 484166 | 27216 | 27235 | TACTTTCTTCTCATGTGACC | 59 | 1452 | N/A |
| 484167 | 27221 | 27240 | CCCAGTACTTTCTTCTCATG | 85 | 1453 | N/A |
| 484168 | 27226 | 27245 | CTGGTCCCAGTACTTTCTTC | 63 | 1454 | N/A |
| 484169 | 27231 | 27250 | TTGTCCTGGTCCCAGTACTT | 86 | 1455 | N/A |
| 484170 | 27236 | 27255 | GGTTCTTGTCCTGGTCCCAG | 90 | 1456 | N/A |
| 484171 | 27241 | 27260 | CCCTGGGTTCTTGTCCTGGT | 82 | 1457 | N/A |
| 484172 | 27246 | 27265 | GGAGTCCCTGGGTTCTTGTC | 74 | 1458 | N/A |
| 484173 | 27251 | 27270 | AGGCTGGAGTCCCTGGGTTC | 53 | 1459 | N/A |
| 484174 | 27256 | 27275 | CTGGGAGGCTGGAGTCCCTG | 55 | 1460 | N/A |
| 484175 | 27352 | 27371 | ACCAGCCAGGCCCAGACCCA | 34 | 1461 | N/A |
| 484176 | 27357 | 27376 | TCCCTACCAGCCAGGCCCAG | 17 | 1462 | N/A |
| 484177 | 27362 | 27381 | TCAGCTCCCTACCAGCCAGG | 47 | 1463 | N/A |
| 484178 | 27367 | 27386 | GCTGCTCAGCTCCCTACCAG | 74 | 1464 | N/A |
| 484179 | 27372 | 27391 | TACAAGCTGCTCAGCTCCCT | 67 | 1465 | N/A |
| 484180 | 27377 | 27396 | TGTTCTACAAGCTGCTCAGC | 73 | 1466 | N/A |
| 484181 | 27382 | 27401 | GCTGGTGTTCTACAAGCTGC | 92 | 1467 | N/A |
| 484182 | 27387 | 27406 | CGTGAGCTGGTGTTCTACAA | 80 | 1468 | N/A |
| 484183 | 27437 | 27456 | TCTGATCAATTATTAACCTA | 21 | 1469 | N/A |

TABLE 24
Inhibition of DGAT2 mRNA by 5-10-5 MOE
gapmers targeting SEQ ID NO: 2

| ISIS | SEQ ID NO: 2 | SEQ ID NO: 2 | | % | SEQ |
|---|---|---|---|---|---|
| NO | Start Site | Stop Site | Sequence | inhibition | ID NO |
| 484184 | 29480 | 29499 | TGGATGTAGACTCTCCATGA | 61 | 1470 |
| 484185 | 29485 | 29504 | AAGGCTGGATGTAGACTCTC | 72 | 1471 |
| 484186 | 29490 | 29509 | AAGATAAGGCTGGATGTAGA | 28 | 1472 |
| 484187 | 29495 | 29514 | GGGAGAAGATAAGGCTGGAT | 50 | 1473 |
| 484188 | 29500 | 29519 | CCCATGGGAGAAGATAAGGC | 62 | 1474 |
| 484189 | 29505 | 29524 | GGTTTCCCATGGGAGAAGAT | 50 | 1475 |
| 484190 | 29538 | 29557 | CATGCTCTCTTCTCACCATG | 71 | 1476 |
| 484191 | 29543 | 29562 | GATGTCATGCTCTCTTCTCA | 66 | 1477 |
| 484192 | 29548 | 29567 | CTCTGGATGTCATGCTCTCT | 82 | 1478 |
| 484193 | 29570 | 29589 | CCAGGTGCTGTAGGCTGCCT | 84 | 1479 |
| 484194 | 29575 | 29594 | TGGTCCCAGGTGCTGTAGGC | 75 | 1480 |
| 484195 | 29580 | 29599 | CCTGGTGGTCCCAGGTGCTG | 62 | 1481 |
| 484196 | 29607 | 29626 | AGGCCAACCCTTGCTGTGTG | 63 | 1482 |
| 484197 | 29612 | 29631 | AAGGGAGGCCAACCCTTGCT | 60 | 1483 |
| 484198 | 29635 | 29654 | TAGGACTTTTTCCACTGCCC | 72 | 1484 |
| 484199 | 29640 | 29659 | CCTTCTAGGACTTTTTCCAC | 41 | 1485 |
| 484200 | 29663 | 29682 | GTTTGGTGGGAGAAGCATGG | 25 | 1486 |
| 484201 | 29668 | 29687 | CTCATGTTTGGTGGGAGAAG | 45 | 1487 |
| 484202 | 29673 | 29692 | AGGTACTCATGTTTGGTGGG | 77 | 1488 |
| 484203 | 29678 | 29697 | GCAGCAGGTACTCATGTTTG | 86 | 1489 |
| 484204 | 29683 | 29702 | CAAGGGCAGCAGGTACTCAT | 81 | 1490 |
| 484205 | 29762 | 29781 | ACATATCATCTCTTGCCTGT | 59 | 1491 |
| 484206 | 29767 | 29786 | TATCTACATATCATCTCTTG | 31 | 1492 |
| 484207 | 29772 | 29791 | CATACTATCTACATATCATC | 10 | 1493 |
| 484208 | 29777 | 29796 | AATATCATACTATCTACATA | 21 | 1494 |
| 484209 | 29782 | 29801 | TCCCCAATATCATACTATCT | 84 | 1495 |
| 484210 | 29804 | 29823 | ACCTCAGCTCTTCAAGAAGT | 61 | 1496 |
| 484211 | 29809 | 29828 | CTCAGACCTCAGCTCTTCAA | 76 | 1497 |
| 484212 | 29814 | 29833 | CCTATCTCAGACCTCAGCTC | 58 | 1498 |
| 484213 | 29819 | 29838 | TAAGGCCTATCTCAGACCTC | 66 | 1499 |
| 484214 | 29824 | 29843 | ACCTTTAAGGCCTATCTCAG | 4 | 1500 |
| 484215 | 29829 | 29848 | ACCCAACCTTTAAGGCCTAT | 86 | 1501 |
| 484216 | 29834 | 29853 | TTTTTACCCAACCTTTAAGG | 53 | 1502 |
| 484217 | 29839 | 29858 | TCCATTTTTTACCCAACCTT | 87 | 1503 |
| 484218 | 29844 | 29863 | CTCTTTCCATTTTTTACCCA | 80 | 1504 |
| 484219 | 29849 | 29868 | CTTCTCTCTTTCCATTTTTT | 75 | 1505 |
| 484220 | 29854 | 29873 | CAGGGCTTCTCTCTTTCCAT | 83 | 1506 |
| 484221 | 29859 | 29878 | CTCAGCAGGGCTTCTCTCTT | 66 | 1507 |
| 484222 | 29864 | 29883 | CTGCCCTCAGCAGGGCTTCT | 0 | 1508 |
| 484223 | 29869 | 29888 | ACTAGCTGCCCTCAGCAGGG | 28 | 1509 |
| 484224 | 29902 | 29921 | TTGTGCCATGCCTGCTTTAT | 39 | 1510 |
| 484225 | 30358 | 30377 | GCAGAGCCCATCAGCCTCCC | 44 | 1511 |
| 484226 | 30363 | 30382 | AAAGCGCAGAGCCCATCAGC | 48 | 1512 |
| 484227 | 30407 | 30426 | CTGGCTCCCTTCCAACATAA | 64 | 1513 |
| 484228 | 30412 | 30431 | GAGGGCTGGCTCCCTTCCAA | 41 | 1514 |
| 484229 | 30417 | 30436 | AGGAGGAGGGCTGGCTCCCT | 12 | 1515 |
| 484230 | 30422 | 30441 | TGCCCAGGAGGAGGGCTGGC | 4 | 1516 |
| 484231 | 30483 | 30502 | TAGGCTTTAGAAATTCACCA | 91 | 1517 |
| 484232 | 30514 | 30533 | CAGGTCTGACTCTACAGTCC | 78 | 1518 |
| 484233 | 30519 | 30538 | AAACACAGGTCTGACTCTAC | 55 | 1519 |
| 484234 | 30524 | 30543 | GATTCAAACACAGGTCTGAC | 62 | 1520 |
| 484235 | 30529 | 30548 | GCCAGGATTCAAACACAGGT | 82 | 1521 |
| 484236 | 30534 | 30553 | GCAGAGCCAGGATTCAAACA | 55 | 1522 |
| 484237 | 30539 | 30558 | CAGTGGCAGAGCCAGGATTC | 66 | 1523 |
| 484238 | 30544 | 30563 | CAGGACAGTGGCAGAGCCAG | 27 | 1524 |
| 484239 | 30549 | 30568 | CCCAGCAGGACAGTGGCAGA | 39 | 1525 |
| 484240 | 30554 | 30573 | GGTCACCCAGCAGGACAGTG | 65 | 1526 |
| 484241 | 30559 | 30578 | CCCAAGGTCACCCAGCAGGA | 76 | 1527 |
| 484242 | 30564 | 30583 | ACTTGCCCAAGGTCACCCAG | 68 | 1528 |
| 484243 | 30569 | 30588 | AGATAACTTGCCCAAGGTCA | 62 | 1529 |
| 484244 | 30610 | 30629 | TTGCCCCATTTTAGAGATAA | 26 | 1530 |
| 484245 | 30615 | 30634 | TGACTTTGCCCCATTTTAGA | 0 | 1531 |
| 484246 | 30621 | 30640 | GCAGGGTGACTTTGCCCCAT | 35 | 1532 |
| 484247 | 30644 | 30663 | TGAGCCACTGTCTCAAGTGT | 42 | 1533 |
| 484248 | 30669 | 30688 | TGCCTCTGCATCTCAAGACT | 75 | 1534 |
| 484249 | 30674 | 30693 | CCCAGTGCCTCTGCATCTCA | 83 | 1535 |
| 484250 | 30712 | 30731 | CCAGCCCAGACACTGTGGAT | 60 | 1536 |
| 484251 | 30717 | 30736 | AGCACCCAGCCCAGACACTG | 59 | 1537 |
| 484252 | 30749 | 30768 | TACTGTCCCCTCCTTGTGTG | 16 | 1538 |
| 484253 | 30773 | 30792 | TTCAGCTTCTTGTGAAGCTG | 0 | 1539 |
| 484254 | 30778 | 30797 | TAGGCTTCAGCTTCTTGTGA | 25 | 1540 |
| 484255 | 30783 | 30802 | GGAGATAGGCTTCAGCTTCT | 58 | 1541 |
| 484256 | 30788 | 30807 | CCAAAGGAGATAGGCTTCAG | 49 | 1542 |
| 484257 | 30887 | 30906 | AGCAGATTCCTGGGACAAGA | 62 | 1543 |
| 484258 | 30922 | 30941 | GAGAAATAGCTACAGGAATG | 36 | 1544 |
| 484259 | 30927 | 30946 | ACCCTGAGAAATAGCTACAG | 22 | 1545 |
| 484260 | 30932 | 30951 | CACAAACCCTGAGAAATAGC | 0 | 1546 |
| 413433 | 32431 | 32450 | GCCTGGACAAGTCCTGCCCA | 88 | 425 |

TABLE 25
Inhibition of DGAT2 mRNA by 5-10-5 MOE
gapmers targeting SEQ ID NO: 2

| ISIS | SEQ ID NO: 2 | SEQ ID NO: 2 | | % | SEQ |
|---|---|---|---|---|---|
| NO | Start Site | Stop Site | Sequence | inhibition | ID NO |
| 484261 | 32253 | 32272 | AAGACTGGGCTTAGGCTAAG | 50 | 1547 |
| 484262 | 32303 | 32322 | TCAGGAAAAGGAGAAGGAAC | 36 | 1548 |
| 484263 | 32336 | 32355 | AGCTTCAAATTTTCTGCAGT | 72 | 1549 |
| 484264 | 32399 | 32418 | AGTTTCTTTACCTCCAAAAT | 48 | 1550 |
| 413433 | 32431 | 32450 | GCCTGGACAAGTCCTGCCCA | 87 | 425 |
| 423463 | 32432 | 32451 | AGCCTGGACAAGTCCTGCCC | 90 | 467 |
| 423464 | 32433 | 32452 | CAGCCTGGACAAGTCCTGCC | 86 | 468 |
| 423465 | 32434 | 32453 | GCAGCCTGGACAAGTCCTGC | 74 | 469 |
| 484265 | 32436 | 32455 | ATGCAGCCTGGACAAGTCCT | 74 | 1551 |
| 484266 | 32441 | 32460 | AGACTATGCAGCCTGGACAA | 63 | 1552 |
| 484267 | 32446 | 32465 | ATACTAGACTATGCAGCCTG | 82 | 1553 |
| 484268 | 32451 | 32470 | CCATCATACTAGACTATGCA | 87 | 1554 |
| 484269 | 32456 | 32475 | TGTTGCCATCATACTAGACT | 83 | 1555 |
| 484270 | 32461 | 32480 | TGCAATGTTGCCATCATACT | 89 | 1556 |
| 484271 | 32466 | 32485 | GTGGTTGCAATGTTGCCATC | 90 | 1557 |
| 484272 | 32471 | 32490 | GGATGGTGGTTGCAATGTTG | 55 | 1558 |
| 484273 | 32476 | 32495 | AGCCTGGATGGTGGTTGCAA | 86 | 1559 |
| 484274 | 32481 | 32500 | CAATAAGCCTGGATGGTGGT | 79 | 1560 |
| 484275 | 32486 | 32505 | GAATTCAATAAGCCTGGATG | 66 | 1561 |
| 484276 | 32510 | 32529 | TCAGTGGAAAAGAACCTGGG | 71 | 1562 |
| 484277 | 32515 | 32534 | GGAAATCAGTGGAAAAGAAC | 55 | 1563 |
| 484278 | 32520 | 32539 | CAGTAGGAAATCAGTGGAAA | 54 | 1564 |
| 484279 | 32525 | 32544 | ACAGGCAGTAGGAAATCAGT | 51 | 1565 |
| 484280 | 32530 | 32549 | GAGAAACAGGCAGTAGGAAA | 56 | 1566 |
| 484281 | 32586 | 32605 | GACCCAGGAAGCTGGAATCA | 66 | 1567 |
| 484282 | 32591 | 32610 | AGGGAGACCCAGGAAGCTGG | 60 | 1568 |
| 484283 | 32619 | 32638 | ACTGAGATCTCCAGCAGCAA | 90 | 1569 |
| 484284 | 32645 | 32664 | AATGGAGTGACAGGGCAGGA | 82 | 1570 |
| 484285 | 32670 | 32689 | AGGGAGCAATGGTGGCAGGT | 71 | 1571 |
| 484286 | 32675 | 32694 | TGGACAGGGAGCAATGGTGG | 46 | 1572 |
| 484287 | 32680 | 32699 | TGCACTGGACAGGGAGCAAT | 36 | 1573 |
| 484288 | 32685 | 32704 | AGCCCTGCACTGGACAGGGA | 41 | 1574 |
| 484289 | 32706 | 32725 | TTGTGTCCCCATGCCCAGCA | 58 | 1575 |
| 484290 | 32711 | 32730 | CTGACTTGTGTCCCCATGCC | 78 | 1576 |
| 484291 | 32716 | 32735 | CAGGGCTGACTTGTGTCCCC | 52 | 1577 |
| 484292 | 32752 | 32771 | ACAAAGTCTATCAGGATGCA | 83 | 1578 |
| 484293 | 32757 | 32776 | AAGTGACAAAGTCTATCAGG | 83 | 1579 |
| 484294 | 32781 | 32800 | GTCTGCCCATGGCCCCATGG | 31 | 1580 |
| 484295 | 32786 | 32805 | AGAAAGTCTGCCCATGGCCC | 45 | 1581 |
| 484296 | 32791 | 32810 | GCTTGAGAAAGTCTGCCCAT | 35 | 1582 |
| 484297 | 32796 | 32815 | AGCAGGCTTGAGAAAGTCTG | 18 | 1583 |
| 484298 | 32801 | 32820 | GGCTCAGCAGGCTTGAGAAA | 60 | 1584 |
| 484299 | 32806 | 32825 | GATGAGGCTCAGCAGGCTTG | 68 | 1585 |
| 484300 | 32811 | 32830 | TTGCAGATGAGGCTCAGCAG | 48 | 1586 |
| 484301 | 32816 | 32835 | CCATTTTGCAGATGAGGCTC | 80 | 1587 |
| 484302 | 32821 | 32840 | CAGCTCCATTTTGCAGATGA | 77 | 1588 |
| 484303 | 32878 | 32897 | AGAACAGTCTATCATCACTC | 34 | 1589 |
| 484304 | 32899 | 32918 | GAGGTGAGAGAGAAAGCAGA | 11 | 1590 |
| 484305 | 32904 | 32923 | CCCCTGAGGTGAGAGAGAAA | 46 | 1591 |
| 484306 | 32909 | 32928 | CCTGGCCCCTGAGGTGAGAG | 38 | 1592 |
| 484307 | 32914 | 32933 | TGGAGCCTGGCCCCTGAGGT | 12 | 1593 |
| 484308 | 32919 | 32938 | AACACTGGAGCCTGGCCCCT | 18 | 1594 |
| 484309 | 32924 | 32943 | CAGAGAACACTGGAGCCTGG | 35 | 1595 |
| 484310 | 32929 | 32948 | GGCAACAGAGAACACTGGAG | 62 | 1596 |
| 484311 | 32934 | 32953 | ACAGTGGCAACAGAGAACAC | 0 | 1597 |
| 484312 | 32940 | 32959 | CAGGCCACAGTGGCAACAGA | 3 | 1598 |
| 484313 | 32945 | 32964 | AGGACCAGGCCACAGTGGCA | 31 | 1599 |
| 484314 | 32950 | 32969 | TCCAGAGGACCAGGCCACAG | 22 | 1600 |
| 484315 | 32973 | 32992 | GGGCTACTGGCCTCCTGGAG | 47 | 1601 |
| 484316 | 33038 | 33057 | CAAAGGACACCTGCCTGTCC | 46 | 1602 |
| 484317 | 33043 | 33062 | GATAGCAAAGGACACCTGCC | 48 | 1603 |
| 484318 | 33065 | 33084 | TCTTTTGGAAGGGTGGAGAT | 16 | 1604 |
| 484319 | 33070 | 33089 | TTGGTTCTTTTGGAAGGGTG | 62 | 1605 |
| 484320 | 33096 | 33115 | GATGTGAGAAGGACACAGGG | 79 | 1606 |
| 484321 | 33101 | 33120 | ACAGAGATGTGAGAAGGACA | 77 | 1607 |
| 484322 | 33106 | 33125 | TTGGAACAGAGATGTGAGAA | 71 | 1608 |
| 484323 | 33111 | 33130 | ACTTCTTGGAACAGAGATGT | 69 | 1609 |
| 484324 | 33161 | 33180 | GCCCTCACAGGGCCAGGTTG | 77 | 1610 |
| 484325 | 33170 | 33189 | CCCCAGGGAGCCCTCACAGG | 68 | 1611 |
| 484326 | 33175 | 33194 | TAGTGCCCCAGGGAGCCCTC | 51 | 1612 |
| 484327 | 33180 | 33199 | TGTCCTAGTGCCCCAGGGAG | 86 | 1613 |
| 484328 | 33217 | 33236 | TCAACACCCCAGCCTGCCTC | 56 | 1614 |
| 484329 | 33222 | 33241 | GAGGCTCAACACCCCAGCCT | 47 | 1615 |
| 484330 | 33360 | 33379 | AGGAGGGTCACACACACCCC | 56 | 1616 |
| 484331 | 33388 | 33407 | GCAAGAGGCCAGGAAAAGGG | 53 | 1617 |
| 484332 | 33393 | 33412 | TACTGGCAAGAGGCCAGGAA | 53 | 1618 |
| 484333 | 33398 | 33417 | ATGATTACTGGCAAGAGGCC | 45 | 1619 |
| 484334 | 33403 | 33422 | ATTACATGATTACTGGCAAG | 30 | 1620 |

TABLE 26
Inhibition of DGAT2 mRNA by 5-10-5 MOE
gapmers targeting SEQ ID NO: 2

| ISIS | SEQ ID NO: 2 | SEQ ID NO: 2 | | % | SEQ |
|---|---|---|---|---|---|
| NO | Start Site | Stop Site | Sequence | inhibition | ID NO |
| 413433 | 32431 | 32450 | GCCTGGACAAGTCCTGCCCA | 94 | 425 |
| 484335 | 35661 | 35680 | AAAATATACATGCTCTTTTT | 52 | 1621 |
| 484336 | 35666 | 35685 | ACTCAAAAATATACATGCTC | 88 | 1622 |
| 484337 | 35671 | 35690 | TTTCTACTCAAAAATATACA | 28 | 1623 |
| 484338 | 35676 | 35695 | TCCTTTTTCTACTCAAAAAT | 64 | 1624 |
| 484339 | 36215 | 36234 | TTCTGATTAGAAAAATAATA | 15 | 1625 |
| 484340 | 36220 | 36239 | TTTTATTCTGATTAGAAAAA | 33 | 1626 |
| 484341 | 36243 | 36262 | TATTCTGCTCATAAAAACAT | 44 | 1627 |
| 484342 | 36248 | 36267 | AAGGGTATTCTGCTCATAAA | 78 | 1628 |
| 484343 | 36253 | 36272 | TGAGTAAGGGTATTCTGCTC | 89 | 1629 |
| 484344 | 36258 | 36277 | GACAATGAGTAAGGGTATTC | 88 | 1630 |
| 484345 | 36263 | 36282 | AGAGAGACAATGAGTAAGGG | 46 | 1631 |
| 484346 | 36268 | 36287 | GGCTGAGAGAGACAATGAGT | 72 | 1632 |
| 484347 | 36318 | 36337 | AGCCTGTGACACCTACCCTG | 68 | 1633 |
| 484348 | 36354 | 36373 | ATGCAGTGTCCCTAAACCCT | 82 | 1634 |
| 484349 | 36359 | 36378 | GGGTGATGCAGTGTCCCTAA | 73 | 1635 |
| 484350 | 36409 | 36428 | TGGCTTCCTCAGGGCCCACC | 90 | 1636 |
| 484351 | 36454 | 36473 | CCTGACCTGTGGTACTAAGG | 68 | 1637 |
| 484352 | 36512 | 36531 | AGCCCTGTGCCAGCCAGCCT | 74 | 1638 |
| 484353 | 36517 | 36536 | GCGACAGCCCTGTGCCAGCC | 92 | 1639 |
| 484354 | 36522 | 36541 | GACAAGCGACAGCCCTGTGC | 60 | 1640 |
| 484355 | 36573 | 36592 | CCACAGTCAGCTGGGCTCAG | 72 | 1641 |
| 484356 | 36578 | 36597 | CTTTCCCACAGTCAGCTGGG | 70 | 1642 |
| 484357 | 36583 | 36602 | GGAAACTTTCCCACAGTCAG | 89 | 1643 |
| 484358 | 36588 | 36607 | CAAATGGAAACTTTCCCACA | 56 | 1644 |
| 484359 | 36617 | 36636 | GGCCTGGAAAAGGGACACTG | 71 | 1645 |
| 484360 | 36622 | 36641 | CCCCTGGCCTGGAAAAGGGA | 48 | 1646 |
| 484361 | 36627 | 36646 | CTACTCCCCTGGCCTGGAAA | 21 | 1647 |
| 484362 | 36632 | 36651 | ACCTCCTACTCCCCTGGCCT | 67 | 1648 |
| 484363 | 36637 | 36656 | AGCCCACCTCCTACTCCCCT | 68 | 1649 |
| 484364 | 36642 | 36661 | CAGGCAGCCCACCTCCTACT | 66 | 1650 |
| 484365 | 36647 | 36666 | TGAGACAGGCAGCCCACCTC | 66 | 1651 |
| 484366 | 36652 | 36671 | CAGAATGAGACAGGCAGCCC | 56 | 1652 |
| 484367 | 36676 | 36695 | CTCTGTGGGCTCCTCCACAG | 45 | 1653 |
| 484368 | 36681 | 36700 | CTGTGCTCTGTGGGCTCCTC | 81 | 1654 |
| 484369 | 36686 | 36705 | TGGCCCTGTGCTCTGTGGGC | 42 | 1655 |
| 484370 | 36691 | 36710 | TTACTTGGCCCTGTGCTCTG | 75 | 1656 |
| 484371 | 36733 | 36752 | ACTGTCAGTCTCTCCAAACT | 73 | 1657 |
| 484372 | 36738 | 36757 | CCCCCACTGTCAGTCTCTCC | 78 | 1658 |
| 484373 | 36743 | 36762 | CTCTGCCCCCACTGTCAGTC | 72 | 1659 |
| 484374 | 36748 | 36767 | GCAAGCTCTGCCCCCACTGT | 71 | 1660 |
| 484375 | 36753 | 36772 | TGGCTGCAAGCTCTGCCCCC | 70 | 1661 |
| 484376 | 36758 | 36777 | GGCCTTGGCTGCAAGCTCTG | 76 | 1662 |
| 484377 | 36841 | 36860 | AATCCAACCCTTGTCACTCT | 88 | 1663 |
| 484378 | 36846 | 36865 | ACTCAAATCCAACCCTTGTC | 81 | 1664 |
| 484379 | 36855 | 36874 | TATTCTAAAACTCAAATCCA | 61 | 1665 |
| 484380 | 36860 | 36879 | GTGATTATTCTAAAACTCAA | 65 | 1666 |
| 484381 | 36865 | 36884 | CCAGAGTGATTATTCTAAAA | 73 | 1667 |
| 484382 | 36896 | 36915 | CCTCCCTCTGGGCCCATCCT | 74 | 1668 |
| 484383 | 36923 | 36942 | TTTGCACTCTGCCAGCCTCC | 78 | 1669 |
| 484384 | 36928 | 36947 | TCTTCTTTGCACTCTGCCAG | 69 | 1670 |
| 484385 | 36969 | 36988 | TGCCCTTGTTCCTCTCAGTC | 68 | 1671 |
| 484386 | 36974 | 36993 | ATGTTTGCCCTTGTTCCTCT | 62 | 1672 |
| 484387 | 37022 | 37041 | GTTGGGCAGTCACCATTTGC | 63 | 1673 |
| 484388 | 37027 | 37046 | CTGGTGTTGGGCAGTCACCA | 30 | 1674 |
| 484389 | 37032 | 37051 | CAGTGCTGGTGTTGGGCAGT | 30 | 1675 |
| 484390 | 37054 | 37073 | CAGACTCTCATCCCCAGGGC | 72 | 1676 |
| 484391 | 37119 | 37138 | GGATGTGTCATTTCCCCTGG | 86 | 1677 |
| 484392 | 37174 | 37193 | AGGAAACTGGCTGGGAGAGG | 20 | 1678 |
| 484393 | 37179 | 37198 | GTCAGAGGAAACTGGCTGGG | 48 | 1679 |
| 484394 | 37184 | 37203 | CTTGGGTCAGAGGAAACTGG | 37 | 1680 |
| 484395 | 37189 | 37208 | ATGACCTTGGGTCAGAGGAA | 38 | 1681 |
| 484396 | 37194 | 37213 | CAAGGATGACCTTGGGTCAG | 36 | 1682 |
| 484397 | 37199 | 37218 | AGCTGCAAGGATGACCTTGG | 48 | 1683 |
| 484398 | 37204 | 37223 | TCACCAGCTGCAAGGATGAC | 24 | 1684 |
| 484399 | 37440 | 37459 | AACAGTGCCCAGCAGGAGCA | 14 | 1685 |
| 484400 | 37445 | 37464 | TTGACAACAGTGCCCAGCAG | 19 | 1686 |
| 484401 | 37450 | 37469 | AGGCCTTGACAACAGTGCCC | 36 | 1687 |
| 484402 | 37455 | 37474 | GGCTCAGGCCTTGACAACAG | 57 | 1688 |
| 484403 | 37460 | 37479 | GGAGAGGCTCAGGCCTTGAC | 53 | 1689 |
| 484404 | 37485 | 37504 | GGCTCCCTGTGTCACCCTGC | 61 | 1690 |
| 484405 | 37490 | 37509 | GTGTTGGCTCCCTGTGTCAC | 39 | 1691 |
| 484406 | 37495 | 37514 | ATGGTGTGTTGGCTCCCTGT | 36 | 1692 |
| 484407 | 37500 | 37519 | AAGGAATGGTGTGTTGGCTC | 48 | 1693 |
| 484408 | 37505 | 37524 | GCACCAAGGAATGGTGTGTT | 30 | 1694 |
| 484409 | 37510 | 37529 | GCCCAGCACCAAGGAATGGT | 48 | 1695 |
| 484410 | 37515 | 37534 | TGCAGGCCCAGCACCAAGGA | 55 | 1696 |
| 484411 | 37520 | 37539 | CCCAATGCAGGCCCAGCACC | 67 | 1697 |

TABLE 27
Inhibition of DGAT2 mRNA by 5-10-5 MOE
gapmers targeting SEQ ID NO: 2

| ISIS | SEQ ID NO: 2 | SEQ ID NO: 2 | | % | SEQ |
|---|---|---|---|---|---|
| NO | Start Site | Stop Site | Sequence | inhibition | ID NO |
| 495425 | 10040 | 10059 | AGGGCCCTTTCCAGAAAATC | 84 | 1698 |
| 495426 | 10041 | 10060 | CAGGGCCCTTTCCAGAAAAT | 29 | 1699 |
| 495427 | 10042 | 10061 | ACAGGGCCCTTTCCAGAAAA | 14 | 1700 |
| 495428 | 10043 | 10062 | CACAGGGCCCTTTCCAGAAA | 64 | 1701 |
| 495429 | 10045 | 10064 | GCCACAGGGCCCTTTCCAGA | 86 | 1702 |
| 495430 | 10046 | 10065 | TGCCACAGGGCCCTTTCCAG | 77 | 1703 |
| 495431 | 10047 | 10066 | CTGCCACAGGGCCCTTTCCA | 50 | 1704 |
| 495432 | 10048 | 10067 | CCTGCCACAGGGCCCTTTCC | 44 | 1705 |
| 495433 | 10206 | 10225 | GAATATCCCTAATAACTAAG | 18 | 1706 |
| 495434 | 10207 | 10226 | CGAATATCCCTAATAACTAA | 8 | 1707 |
| 495435 | 10208 | 10227 | TCGAATATCCCTAATAACTA | 18 | 1708 |
| 495436 | 10209 | 10228 | CTCGAATATCCCTAATAACT | 66 | 1709 |
| 495437 | 10211 | 10230 | TTCTCGAATATCCCTAATAA | 31 | 1710 |
| 495438 | 10212 | 10231 | GTTCTCGAATATCCCTAATA | 69 | 1711 |
| 495439 | 10213 | 10232 | AGTTCTCGAATATCCCTAAT | 36 | 1712 |
| 495440 | 10214 | 10233 | GAGTTCTCGAATATCCCTAA | 84 | 1713 |
| 495441 | 10216 | 10235 | AGGAGTTCTCGAATATCCCT | 79 | 1714 |
| 495442 | 10217 | 10236 | GAGGAGTTCTCGAATATCCC | 83 | 1715 |
| 495443 | 10218 | 10237 | GGAGGAGTTCTCGAATATCC | 78 | 1716 |
| 495444 | 10219 | 10238 | GGGAGGAGTTCTCGAATATC | 64 | 1717 |
| 495445 | 10491 | 10510 | GCAGGGTCCTCTCCGCTGCC | 70 | 1718 |
| 495446 | 10492 | 10511 | TGCAGGGTCCTCTCCGCTGC | 80 | 1719 |
| 495447 | 10528 | 10547 | GATTCACTGAGGACCTCAGT | 71 | 1720 |
| 495448 | 10529 | 10548 | CGATTCACTGAGGACCTCAG | 78 | 1721 |
| 495449 | 10530 | 10549 | GCGATTCACTGAGGACCTCA | 94 | 1722 |
| 495450 | 10531 | 10550 | CGCGATTCACTGAGGACCTC | 90 | 1723 |
| 495451 | 10533 | 10552 | TGCGCGATTCACTGAGGACC | 82 | 1724 |
| 495452 | 10534 | 10553 | CTGCGCGATTCACTGAGGAC | 77 | 1725 |
| 495453 | 10535 | 10554 | TCTGCGCGATTCACTGAGGA | 81 | 1726 |
| 495454 | 10536 | 10555 | CTCTGCGCGATTCACTGAGG | 85 | 1727 |
| 495455 | 10646 | 10665 | CCTCCCACTTCAGTTTCTCC | 64 | 1728 |
| 495456 | 10647 | 10666 | TCCTCCCACTTCAGTTTCTC | 71 | 1729 |
| 495457 | 10648 | 10667 | TTCCTCCCACTTCAGTTTCT | 63 | 1730 |
| 495458 | 10649 | 10668 | CTTCCTCCCACTTCAGTTTC | 70 | 1731 |
| 495459 | 10651 | 10670 | TGCTTCCTCCCACTTCAGTT | 63 | 1732 |
| 495460 | 10652 | 10671 | ATGCTTCCTCCCACTTCAGT | 55 | 1733 |
| 495461 | 10653 | 10672 | CATGCTTCCTCCCACTTCAG | 70 | 1734 |
| 495462 | 10654 | 10673 | GCATGCTTCCTCCCACTTCA | 78 | 1735 |
| 495463 | 10656 | 10675 | AGGCATGCTTCCTCCCACTT | 81 | 1736 |
| 495464 | 10657 | 10676 | TAGGCATGCTTCCTCCCACT | 85 | 1737 |
| 495465 | 10658 | 10677 | TTAGGCATGCTTCCTCCCAC | 78 | 1738 |
| 495466 | 10659 | 10678 | CTTAGGCATGCTTCCTCCCA | 83 | 1739 |
| 495467 | 10661 | 10680 | AACTTAGGCATGCTTCCTCC | 82 | 1740 |
| 495468 | 10662 | 10681 | AAACTTAGGCATGCTTCCTC | 76 | 1741 |
| 495469 | 10663 | 10682 | AAAACTTAGGCATGCTTCCT | 83 | 1742 |
| 495470 | 10664 | 10683 | GAAAACTTAGGCATGCTTCC | 87 | 1743 |
| 495471 | 10666 | 10685 | AGGAAAACTTAGGCATGCTT | 83 | 1744 |
| 495472 | 10667 | 10686 | AAGGAAAACTTAGGCATGCT | 85 | 1745 |
| 495473 | 10668 | 10687 | TAAGGAAAACTTAGGCATGC | 76 | 1746 |
| 495474 | 10669 | 10688 | CTAAGGAAAACTTAGGCATG | 59 | 1747 |
| 495475 | 10671 | 10690 | AGCTAAGGAAAACTTAGGCA | 65 | 1748 |
| 495476 | 10672 | 10691 | CAGCTAAGGAAAACTTAGGC | 70 | 1749 |
| 495477 | 10673 | 10692 | TCAGCTAAGGAAAACTTAGG | 40 | 1750 |
| 495478 | 10674 | 10693 | ATCAGCTAAGGAAAACTTAG | 25 | 1751 |
| 495479 | 10728 | 10747 | TGTGATGACTTCCCAGGGTC | 75 | 1752 |
| 495480 | 10729 | 10748 | CTGTGATGACTTCCCAGGGT | 72 | 1753 |
| 495481 | 10730 | 10749 | GCTGTGATGACTTCCCAGGG | 87 | 1754 |
| 495482 | 10731 | 10750 | AGCTGTGATGACTTCCCAGG | 80 | 1755 |
| 495483 | 10733 | 10752 | ACAGCTGTGATGACTTCCCA | 79 | 1756 |
| 495484 | 10734 | 10753 | GACAGCTGTGATGACTTCCC | 86 | 1757 |
| 495485 | 10735 | 10754 | GGACAGCTGTGATGACTTCC | 80 | 1758 |
| 495486 | 10736 | 10755 | AGGACAGCTGTGATGACTTC | 62 | 1759 |
| 495487 | 10815 | 10834 | CATGTCAGAGAGGCTCAGCA | 72 | 1760 |
| 495488 | 10816 | 10835 | CCATGTCAGAGAGGCTCAGC | 87 | 1761 |
| 495489 | 10817 | 10836 | TCCATGTCAGAGAGGCTCAG | 86 | 1762 |
| 495490 | 10818 | 10837 | ATCCATGTCAGAGAGGCTCA | 88 | 1763 |
| 495491 | 10820 | 10839 | AAATCCATGTCAGAGAGGCT | 85 | 1764 |
| 495492 | 10821 | 10840 | AAAATCCATGTCAGAGAGGC | 86 | 1765 |
| 495493 | 10822 | 10841 | AAAAATCCATGTCAGAGAGG | 57 | 1766 |
| 495494 | 10823 | 10842 | GAAAAATCCATGTCAGAGAG | 52 | 1767 |
| 495495 | 10941 | 10960 | TGGATAGTCGATTTACCAGA | 92 | 1768 |
| 495496 | 10942 | 10961 | TTGGATAGTCGATTTACCAG | 89 | 1769 |
| 495497 | 10944 | 10963 | CTTTGGATAGTCGATTTACC | 89 | 1770 |
| 495498 | 11075 | 11094 | ACCTCGATGTTACATTAAGG | 90 | 1771 |
| 495499 | 11076 | 11095 | AACCTCGATGTTACATTAAG | 72 | 1772 |
| 495500 | 11077 | 11096 | AAACCTCGATGTTACATTAA | 64 | 1773 |
| 495501 | 11078 | 11097 | GAAACCTCGATGTTACATTA | 71 | 1774 |
| 413433 | 32431 | 32450 | GCCTGGACAAGTCCTGCCCA | 74 | 425 |

TABLE 28
Inhibition of DGAT2 mRNA by 5-10-5 MOE
gapmers targeting SEQ ID NO: 2

| ISIS | SEQ ID NO: 2 | SEQ ID NO: 2 | | % | SEQ |
|---|---|---|---|---|---|
| NO | Start Site | Stop Site | Sequence | inhibition | ID NO |
| 495502 | 11124 | 11143 | TATTGCAACCACTAGGACAT | 78 | 1775 |
| 495503 | 11125 | 11144 | TTATTGCAACCACTAGGACA | 72 | 1776 |
| 495504 | 11126 | 11145 | GTTATTGCAACCACTAGGAC | 79 | 1777 |
| 495505 | 11127 | 11146 | GGTTATTGCAACCACTAGGA | 91 | 1778 |
| 495506 | 11129 | 11148 | TGGGTTATTGCAACCACTAG | 91 | 1779 |
| 495507 | 11130 | 11149 | GTGGGTTATTGCAACCACTA | 86 | 1780 |
| 495508 | 11131 | 11150 | GGTGGGTTATTGCAACCACT | 85 | 1781 |
| 495509 | 11159 | 11178 | TCACAGTTAAAGTGTGGTAC | 82 | 1782 |
| 495510 | 11160 | 11179 | GTCACAGTTAAAGTGTGGTA | 84 | 1783 |
| 495511 | 11161 | 11180 | GGTCACAGTTAAAGTGTGGT | 78 | 1784 |
| 495512 | 11162 | 11181 | AGGTCACAGTTAAAGTGTGG | 7 | 1785 |
| 495513 | 11169 | 11188 | AATGCCTAGGTCACAGTTAA | 46 | 1786 |
| 495514 | 11170 | 11189 | CAATGCCTAGGTCACAGTTA | 80 | 1787 |
| 495515 | 11171 | 11190 | CCAATGCCTAGGTCACAGTT | 88 | 1788 |
| 495516 | 11172 | 11191 | GCCAATGCCTAGGTCACAGT | 94 | 1789 |
| 495517 | 11174 | 11193 | ATGCCAATGCCTAGGTCACA | 92 | 1790 |
| 495518 | 11175 | 11194 | AATGCCAATGCCTAGGTCAC | 93 | 1791 |
| 495519 | 11176 | 11195 | CAATGCCAATGCCTAGGTCA | 92 | 1792 |
| 495520 | 11177 | 11196 | GCAATGCCAATGCCTAGGTC | 92 | 1793 |
| 495521 | 11200 | 11219 | CCACAGCGATAATCACACAA | 84 | 1794 |
| 495522 | 11201 | 11220 | ACCACAGCGATAATCACACA | 92 | 1795 |
| 495523 | 11202 | 11221 | AACCACAGCGATAATCACAC | 94 | 1796 |
| 495524 | 11203 | 11222 | TAACCACAGCGATAATCACA | 91 | 1797 |
| 495525 | 14504 | 14523 | GCAGGGTCTGCCACTCTCTA | 86 | 1798 |
| 495526 | 14505 | 14524 | AGCAGGGTCTGCCACTCTCT | 92 | 1799 |
| 495527 | 14506 | 14525 | GAGCAGGGTCTGCCACTCTC | 91 | 1800 |
| 495528 | 14507 | 14526 | AGAGCAGGGTCTGCCACTCT | 82 | 1801 |
| 495529 | 14649 | 14668 | GCACAGTCATCTTGTGTACA | 86 | 1802 |
| 495530 | 14650 | 14669 | TGCACAGTCATCTTGTGTAC | 81 | 1803 |
| 495531 | 14651 | 14670 | CTGCACAGTCATCTTGTGTA | 80 | 1804 |
| 495532 | 14652 | 14671 | TCTGCACAGTCATCTTGTGT | 64 | 1805 |
| 495533 | 14659 | 14678 | AGATCACTCTGCACAGTCAT | 81 | 1806 |
| 495534 | 14660 | 14679 | CAGATCACTCTGCACAGTCA | 87 | 1807 |
| 495535 | 14661 | 14680 | TCAGATCACTCTGCACAGTC | 90 | 1808 |
| 495536 | 14662 | 14681 | CTCAGATCACTCTGCACAGT | 86 | 1809 |
| 495537 | 14664 | 14683 | TGCTCAGATCACTCTGCACA | 87 | 1810 |
| 495538 | 14665 | 14684 | TTGCTCAGATCACTCTGCAC | 78 | 1811 |
| 495539 | 14666 | 14685 | ATTGCTCAGATCACTCTGCA | 84 | 1812 |
| 495540 | 14667 | 14686 | CATTGCTCAGATCACTCTGC | 88 | 1813 |
| 495541 | 14741 | 14760 | CCTCTTCCAGGAAGACTTCC | 80 | 1814 |
| 495542 | 14742 | 14761 | ACCTCTTCCAGGAAGACTTC | 72 | 1815 |
| 495543 | 14743 | 14762 | CACCTCTTCCAGGAAGACTT | 88 | 1816 |
| 495544 | 14744 | 14763 | TCACCTCTTCCAGGAAGACT | 86 | 1817 |
| 495545 | 14746 | 14765 | TGTCACCTCTTCCAGGAAGA | 82 | 1818 |
| 495546 | 14747 | 14766 | ATGTCACCTCTTCCAGGAAG | 42 | 1819 |
| 495547 | 14748 | 14767 | AATGTCACCTCTTCCAGGAA | 50 | 1820 |
| 495548 | 14749 | 14768 | GAATGTCACCTCTTCCAGGA | 74 | 1821 |
| 495549 | 14751 | 14770 | CTGAATGTCACCTCTTCCAG | 75 | 1822 |
| 495550 | 14752 | 14771 | ACTGAATGTCACCTCTTCCA | 81 | 1823 |
| 495551 | 14753 | 14772 | GACTGAATGTCACCTCTTCC | 81 | 1824 |
| 495552 | 14754 | 14773 | GGACTGAATGTCACCTCTTC | 88 | 1825 |
| 495553 | 14756 | 14775 | CCGGACTGAATGTCACCTCT | 90 | 1826 |
| 495554 | 14757 | 14776 | TCCGGACTGAATGTCACCTC | 91 | 1827 |
| 495555 | 14758 | 14777 | ATCCGGACTGAATGTCACCT | 91 | 1828 |
| 495556 | 14759 | 14778 | GATCCGGACTGAATGTCACC | 85 | 1829 |
| 495557 | 14766 | 14785 | CTTTCCAGATCCGGACTGAA | 67 | 1830 |
| 495558 | 14767 | 14786 | TCTTTCCAGATCCGGACTGA | 77 | 1831 |
| 495559 | 14768 | 14787 | ATCTTTCCAGATCCGGACTG | 69 | 1832 |
| 495560 | 14769 | 14788 | CATCTTTCCAGATCCGGACT | 88 | 1833 |
| 495561 | 14771 | 14790 | TTCATCTTTCCAGATCCGGA | 89 | 1834 |
| 495562 | 14772 | 14791 | ATTCATCTTTCCAGATCCGG | 94 | 1835 |
| 495563 | 14773 | 14792 | TATTCATCTTTCCAGATCCG | 92 | 1836 |
| 495564 | 14774 | 14793 | CTATTCATCTTTCCAGATCC | 84 | 1837 |
| 495565 | 14992 | 15011 | CTCAAGTCTTCCTCCTGCTG | 79 | 1838 |
| 495566 | 14993 | 15012 | TCTCAAGTCTTCCTCCTGCT | 83 | 1839 |
| 495567 | 14994 | 15013 | CTCTCAAGTCTTCCTCCTGC | 63 | 1840 |
| 495568 | 14995 | 15014 | GCTCTCAAGTCTTCCTCCTG | 86 | 1841 |
| 495569 | 14997 | 15016 | GAGCTCTCAAGTCTTCCTCC | 84 | 1842 |
| 495570 | 14998 | 15017 | TGAGCTCTCAAGTCTTCCTC | 90 | 1843 |
| 495571 | 14999 | 15018 | ATGAGCTCTCAAGTCTTCCT | 91 | 1844 |
| 495572 | 15000 | 15019 | CATGAGCTCTCAAGTCTTCC | 85 | 1845 |
| 495573 | 15248 | 15267 | CATAATCTGCACAGGTTCTT | 84 | 1846 |
| 495574 | 15249 | 15268 | CCATAATCTGCACAGGTTCT | 87 | 1847 |
| 495575 | 15250 | 15269 | ACCATAATCTGCACAGGTTC | 91 | 1848 |
| 495576 | 15251 | 15270 | CACCATAATCTGCACAGGTT | 94 | 1849 |
| 495577 | 15253 | 15272 | TGCACCATAATCTGCACAGG | 90 | 1850 |
| 495578 | 15254 | 15273 | CTGCACCATAATCTGCACAG | 86 | 1851 |
| 413433 | 32431 | 32450 | GCCTGGACAAGTCCTGCCCA | 92 | 425 |

TABLE 29
Inhibition of DGAT2 mRNA by 5-10-5 MOE
gapmers targeting SEQ ID NO: 2

| ISIS | SEQ ID NO: 2 | SEQ ID NO: 2 | | % | SEQ |
|---|---|---|---|---|---|
| NO | Start Site | Stop Site | Sequence | inhibition | ID NO |
| 495579 | 15255 | 15274 | TCTGCACCATAATCTGCACA | 78 | 1852 |
| 495580 | 15256 | 15275 | ATCTGCACCATAATCTGCAC | 73 | 1853 |
| 495581 | 18152 | 18171 | TAATCCAGGATTGTCATAAG | 53 | 1854 |
| 495582 | 18153 | 18172 | TTAATCCAGGATTGTCATAA | 54 | 1855 |
| 495583 | 18154 | 18173 | TTTAATCCAGGATTGTCATA | 40 | 1856 |
| 495584 | 18155 | 18174 | CTTTAATCCAGGATTGTCAT | 70 | 1857 |
| 495585 | 18157 | 18176 | AGCTTTAATCCAGGATTGTC | 81 | 1858 |
| 495586 | 18158 | 18177 | TAGCTTTAATCCAGGATTGT | 37 | 1859 |
| 495587 | 18159 | 18178 | TTAGCTTTAATCCAGGATTG | 60 | 1860 |
| 495588 | 18160 | 18179 | CTTAGCTTTAATCCAGGATT | 75 | 1861 |
| 495589 | 18162 | 18181 | TCCTTAGCTTTAATCCAGGA | 78 | 1862 |
| 495590 | 18163 | 18182 | CTCCTTAGCTTTAATCCAGG | 77 | 1863 |
| 495591 | 18164 | 18183 | CCTCCTTAGCTTTAATCCAG | 82 | 1864 |
| 495592 | 18165 | 18184 | TCCTCCTTAGCTTTAATCCA | 73 | 1865 |
| 495593 | 18167 | 18186 | TGTCCTCCTTAGCTTTAATC | 69 | 1866 |
| 495594 | 18168 | 18187 | GTGTCCTCCTTAGCTTTAAT | 61 | 1867 |
| 495595 | 18169 | 18188 | AGTGTCCTCCTTAGCTTTAA | 51 | 1868 |
| 495596 | 18170 | 18189 | CAGTGTCCTCCTTAGCTTTA | 61 | 1869 |
| 495597 | 18172 | 18191 | CTCAGTGTCCTCCTTAGCTT | 76 | 1870 |
| 495598 | 18173 | 18192 | ACTCAGTGTCCTCCTTAGCT | 81 | 1871 |
| 495599 | 18174 | 18193 | GACTCAGTGTCCTCCTTAGC | 83 | 1872 |
| 495600 | 18175 | 18194 | GGACTCAGTGTCCTCCTTAG | 80 | 1873 |
| 495601 | 18177 | 18196 | TGGGACTCAGTGTCCTCCTT | 64 | 1874 |
| 495602 | 18178 | 18197 | CTGGGACTCAGTGTCCTCCT | 72 | 1875 |
| 495603 | 18179 | 18198 | CCTGGGACTCAGTGTCCTCC | 77 | 1876 |
| 495604 | 18180 | 18199 | CCCTGGGACTCAGTGTCCTC | 88 | 1877 |
| 495605 | 18307 | 18326 | TCCTGTTTGATGGGTAAAAT | 77 | 1878 |
| 495606 | 18308 | 18327 | CTCCTGTTTGATGGGTAAAA | 83 | 1879 |
| 495607 | 18309 | 18328 | TCTCCTGTTTGATGGGTAAA | 78 | 1880 |
| 495608 | 18310 | 18329 | CTCTCCTGTTTGATGGGTAA | 81 | 1881 |
| 495609 | 18312 | 18331 | TCCTCTCCTGTTTGATGGGT | 83 | 1882 |
| 495610 | 18313 | 18332 | GTCCTCTCCTGTTTGATGGG | 77 | 1883 |
| 495611 | 18314 | 18333 | TGTCCTCTCCTGTTTGATGG | 69 | 1884 |
| 495612 | 18315 | 18334 | GTGTCCTCTCCTGTTTGATG | 76 | 1885 |
| 495613 | 18317 | 18336 | CGGTGTCCTCTCCTGTTTGA | 77 | 1886 |
| 495614 | 18318 | 18337 | TCGGTGTCCTCTCCTGTTTG | 72 | 1887 |
| 495615 | 18319 | 18338 | CTCGGTGTCCTCTCCTGTTT | 69 | 1888 |
| 495616 | 18320 | 18339 | CCTCGGTGTCCTCTCCTGTT | 77 | 1889 |
| 495617 | 18322 | 18341 | AGCCTCGGTGTCCTCTCCTG | 72 | 1890 |
| 495618 | 18323 | 18342 | AAGCCTCGGTGTCCTCTCCT | 84 | 1891 |
| 495619 | 18324 | 18343 | TAAGCCTCGGTGTCCTCTCC | 88 | 1892 |
| 495620 | 18325 | 18344 | GTAAGCCTCGGTGTCCTCTC | 91 | 1893 |
| 495621 | 18327 | 18346 | AAGTAAGCCTCGGTGTCCTC | 86 | 1894 |
| 495622 | 18328 | 18347 | CAAGTAAGCCTCGGTGTCCT | 81 | 1895 |
| 495623 | 18330 | 18349 | ACCAAGTAAGCCTCGGTGTC | 79 | 1896 |
| 495624 | 18418 | 18437 | CTCACCAGATTGTTGTGGGA | 79 | 1897 |
| 495625 | 18419 | 18438 | CCTCACCAGATTGTTGTGGG | 77 | 1898 |
| 495626 | 18420 | 18439 | ACCTCACCAGATTGTTGTGG | 79 | 1899 |
| 495627 | 18421 | 18440 | TACCTCACCAGATTGTTGTG | 47 | 1900 |
| 495628 | 18428 | 18447 | TAATACCTACCTCACCAGAT | 56 | 1901 |
| 495629 | 18429 | 18448 | CTAATACCTACCTCACCAGA | 49 | 1902 |
| 495630 | 18430 | 18449 | GCTAATACCTACCTCACCAG | 60 | 1903 |
| 495631 | 18431 | 18450 | GGCTAATACCTACCTCACCA | 70 | 1904 |
| 495632 | 18451 | 18470 | CTTCCTCATCTATACAGTGG | 72 | 1905 |
| 495633 | 18452 | 18471 | GCTTCCTCATCTATACAGTG | 72 | 1906 |
| 495634 | 18453 | 18472 | AGCTTCCTCATCTATACAGT | 63 | 1907 |
| 495635 | 18454 | 18473 | CAGCTTCCTCATCTATACAG | 66 | 1908 |
| 495636 | 18582 | 18601 | CCATACTGGCATCTGGCAGG | 78 | 1909 |
| 495637 | 18583 | 18602 | TCCATACTGGCATCTGGCAG | 73 | 1910 |
| 495638 | 18584 | 18603 | CTCCATACTGGCATCTGGCA | 78 | 1911 |
| 495639 | 18585 | 18604 | CCTCCATACTGGCATCTGGC | 82 | 1912 |
| 495640 | 18587 | 18606 | CACCTCCATACTGGCATCTG | 51 | 1913 |
| 495641 | 18588 | 18607 | TCACCTCCATACTGGCATCT | 71 | 1914 |
| 495642 | 18589 | 18608 | CTCACCTCCATACTGGCATC | 72 | 1915 |
| 495643 | 18590 | 18609 | CCTCACCTCCATACTGGCAT | 70 | 1916 |
| 495644 | 18592 | 18611 | CACCTCACCTCCATACTGGC | 68 | 1917 |
| 495645 | 18593 | 18612 | CCACCTCACCTCCATACTGG | 54 | 1918 |
| 495646 | 18594 | 18613 | CCCACCTCACCTCCATACTG | 45 | 1919 |
| 495647 | 18595 | 18614 | ACCCACCTCACCTCCATACT | 37 | 1920 |
| 495648 | 18827 | 18846 | GGATGCTTAACTTCTGCTGA | 67 | 1921 |
| 495649 | 18828 | 18847 | AGGATGCTTAACTTCTGCTG | 83 | 1922 |
| 495650 | 18829 | 18848 | TAGGATGCTTAACTTCTGCT | 84 | 1923 |
| 495651 | 18830 | 18849 | TTAGGATGCTTAACTTCTGC | 68 | 1924 |
| 495652 | 18832 | 18851 | AGTTAGGATGCTTAACTTCT | 50 | 1925 |
| 495653 | 18833 | 18852 | AAGTTAGGATGCTTAACTTC | 49 | 1926 |
| 495654 | 18834 | 18853 | TAAGTTAGGATGCTTAACTT | 49 | 1927 |
| 495655 | 18835 | 18854 | TTAAGTTAGGATGCTTAACT | 42 | 1928 |
| 413433 | 32431 | 32450 | GCCTGGACAAGTCCTGCCCA | 82 | 425 |

TABLE 30
Inhibition of DGAT2 mRNA by 5-10-5 MOE
gapmers targeting SEQ ID NO: 2

| ISIS | SEQ ID NO: 2 | SEQ ID NO: 2 | | % | SEQ |
|---|---|---|---|---|---|
| NO | Start Site | Stop Site | Sequence | inhibition | ID NO |
| 423461 | 32429 | 32448 | CTGGACAAGTCCTGCCCATC | 73 | 465 |
| 423462 | 32430 | 32449 | CCTGGACAAGTCCTGCCCAT | 70 | 466 |
| 413433 | 32431 | 32450 | GCCTGGACAAGTCCTGCCCA | 87 | 425 |
| 495656 | 18870 | 18889 | TATAGGCCTGGATGCCCAAG | 70 | 1929 |
| | 20780 | 20799 | | | |
| 495657 | 18871 | 18890 | CTATAGGCCTGGATGCCCAA | 72 | 1930 |
| | 20781 | 20800 | | | |
| 495658 | 18896 | 18915 | AGATGATGTCCTGCCTCAGA | 30 | 1931 |
| 495659 | 18897 | 18916 | CAGATGATGTCCTGCCTCAG | 37 | 1932 |
| 495660 | 18898 | 18917 | GCAGATGATGTCCTGCCTCA | 65 | 1933 |
| 495661 | 18899 | 18918 | AGCAGATGATGTCCTGCCTC | 72 | 1934 |
| 495662 | 19014 | 19033 | AGTCAAAGGTGGCTTCCTGG | 67 | 1935 |
| 495663 | 19015 | 19034 | TAGTCAAAGGTGGCTTCCTG | 57 | 1936 |
| 495664 | 19016 | 19035 | GTAGTCAAAGGTGGCTTCCT | 75 | 1937 |
| 495665 | 19017 | 19036 | AGTAGTCAAAGGTGGCTTCC | 66 | 1938 |
| 495666 | 19020 | 19039 | ATGAGTAGTCAAAGGTGGCT | 73 | 1939 |
| 495667 | 19021 | 19040 | AATGAGTAGTCAAAGGTGGC | 64 | 1940 |
| 495668 | 19022 | 19041 | GAATGAGTAGTCAAAGGTGG | 31 | 1941 |
| 495669 | 20775 | 20794 | GCCTGGATGCCCAAGTTAGA | 72 | 1942 |
| 495670 | 20776 | 20795 | GGCCTGGATGCCCAAGTTAG | 73 | 1943 |
| 495671 | 20777 | 20796 | AGGCCTGGATGCCCAAGTTA | 77 | 1944 |
| 495672 | 20778 | 20797 | TAGGCCTGGATGCCCAAGTT | 57 | 1945 |
| 495673 | 22544 | 22563 | ACAAGTGGGAAATGCAGTCT | 48 | 1946 |
| 495674 | 22545 | 22564 | AACAAGTGGGAAATGCAGTC | 42 | 1947 |
| 495675 | 22546 | 22565 | CAACAAGTGGGAAATGCAGT | 35 | 1948 |
| 495676 | 22547 | 22566 | CCAACAAGTGGGAAATGCAG | 62 | 1949 |
| 495677 | 22549 | 22568 | TGCCAACAAGTGGGAAATGC | 70 | 1950 |
| 495678 | 22550 | 22569 | CTGCCAACAAGTGGGAAATG | 52 | 1951 |
| 495679 | 22551 | 22570 | TCTGCCAACAAGTGGGAAAT | 39 | 1952 |
| 495680 | 22552 | 22571 | CTCTGCCAACAAGTGGGAAA | 34 | 1953 |
| 495681 | 22767 | 22786 | GCTTATTAGGTGTCTTAAAA | 51 | 1954 |
| 495682 | 22768 | 22787 | AGCTTATTAGGTGTCTTAAA | 56 | 1955 |
| 495683 | 22769 | 22788 | AAGCTTATTAGGTGTCTTAA | 59 | 1956 |
| 495684 | 22770 | 22789 | TAAGCTTATTAGGTGTCTTA | 63 | 1957 |
| 495685 | 22772 | 22791 | GCTAAGCTTATTAGGTGTCT | 86 | 1958 |
| 495686 | 22773 | 22792 | TGCTAAGCTTATTAGGTGTC | 80 | 1959 |
| 495687 | 22774 | 22793 | CTGCTAAGCTTATTAGGTGT | 68 | 1960 |
| 495688 | 22775 | 22794 | TCTGCTAAGCTTATTAGGTG | 64 | 1961 |
| 495689 | 22882 | 22901 | CCCCATGCAGCTTGGAGGAG | 60 | 1962 |
| 495690 | 22883 | 22902 | CCCCCATGCAGCTTGGAGGA | 53 | 1963 |
| 495691 | 22884 | 22903 | GCCCCCATGCAGCTTGGAGG | 43 | 1964 |
| 495692 | 22885 | 22904 | AGCCCCCATGCAGCTTGGAG | 61 | 1965 |
| 495693 | 22887 | 22906 | CCAGCCCCCATGCAGCTTGG | 66 | 1966 |
| 495694 | 22888 | 22907 | GCCAGCCCCCATGCAGCTTG | 78 | 1967 |
| 495695 | 22889 | 22908 | GGCCAGCCCCCATGCAGCTT | 71 | 1968 |
| 495696 | 22890 | 22909 | GGGCCAGCCCCCATGCAGCT | 63 | 1969 |
| 495697 | 23096 | 23115 | AGTCCAAACACTCAGGTAGG | 82 | 1970 |
| 495698 | 23097 | 23116 | CAGTCCAAACACTCAGGTAG | 68 | 1971 |
| 495699 | 23098 | 23117 | TCAGTCCAAACACTCAGGTA | 74 | 1972 |
| 495700 | 23099 | 23118 | TTCAGTCCAAACACTCAGGT | 72 | 1973 |
| 495701 | 23238 | 23257 | GGGAACAGCAGCATCAGCAT | 77 | 1974 |
| 495702 | 23239 | 23258 | TGGGAACAGCAGCATCAGCA | 83 | 1975 |
| 495703 | 23240 | 23259 | CTGGGAACAGCAGCATCAGC | 68 | 1976 |
| 495704 | 23241 | 23260 | TCTGGGAACAGCAGCATCAG | 65 | 1977 |
| 495705 | 23243 | 23262 | GGTCTGGGAACAGCAGCATC | 84 | 1978 |
| 495706 | 23244 | 23263 | TGGTCTGGGAACAGCAGCAT | 81 | 1979 |
| 495707 | 23245 | 23264 | GTGGTCTGGGAACAGCAGCA | 84 | 1980 |
| 495708 | 23423 | 23442 | CAAGTCATCTTCCAGCAGCT | 57 | 1981 |
| 495709 | 23424 | 23443 | ACAAGTCATCTTCCAGCAGC | 36 | 1982 |
| 495710 | 23425 | 23444 | GACAAGTCATCTTCCAGCAG | 38 | 1983 |
| 495711 | 23426 | 23445 | GGACAAGTCATCTTCCAGCA | 77 | 1984 |
| 495712 | 23428 | 23447 | CTGGACAAGTCATCTTCCAG | 53 | 1985 |
| 495713 | 23429 | 23448 | GCTGGACAAGTCATCTTCCA | 66 | 1986 |
| 495714 | 23430 | 23449 | GGCTGGACAAGTCATCTTCC | 76 | 1987 |
| 495715 | 23431 | 23450 | GGGCTGGACAAGTCATCTTC | 45 | 1988 |
| 495716 | 23548 | 23567 | ATCCTTGAGGGTCTCATAAC | 58 | 1989 |
| 495717 | 23549 | 23568 | TATCCTTGAGGGTCTCATAA | 61 | 1990 |
| 495718 | 23551 | 23570 | CTTATCCTTGAGGGTCTCAT | 83 | 1991 |
| 495719 | 23553 | 23572 | TGCTTATCCTTGAGGGTCTC | 79 | 1992 |
| 495720 | 23554 | 23573 | ATGCTTATCCTTGAGGGTCT | 73 | 1993 |
| 495721 | 23555 | 23574 | CATGCTTATCCTTGAGGGTC | 64 | 1994 |
| 495722 | 23556 | 23575 | ACATGCTTATCCTTGAGGGT | 60 | 1995 |
| 495723 | 26396 | 26415 | CTGGATGGCAACCTAAGGAG | 61 | 1996 |
| 495724 | 26397 | 26416 | CCTGGATGGCAACCTAAGGA | 74 | 1997 |
| 495725 | 26398 | 26417 | GCCTGGATGGCAACCTAAGG | 61 | 1998 |
| 495726 | 26399 | 26418 | GGCCTGGATGGCAACCTAAG | 60 | 1999 |
| 495727 | 26401 | 26420 | CTGGCCTGGATGGCAACCTA | 69 | 2000 |
| 495728 | 26480 | 26499 | TGCTATGCTGAGAGCACAGG | 69 | 2001 |
| 495729 | 26481 | 26500 | CTGCTATGCTGAGAGCACAG | 64 | 2002 |
| 495730 | 26482 | 26501 | CCTGCTATGCTGAGAGCACA | 81 | 2003 |

TABLE 31
Inhibition of DGAT2 mRNA by 5-10-5 MOE
gapmers targeting SEQ ID NO: 2

| ISIS | SEQ ID NO: 2 | SEQ ID NO: 2 | | % | SEQ |
|---|---|---|---|---|---|
| NO | Start Site | Stop Site | Sequence | inhibition | ID NO |
| 495731 | 26483 | 26502 | ACCTGCTATGCTGAGAGCAC | 75 | 2004 |
| 495732 | 26485 | 26504 | CTACCTGCTATGCTGAGAGC | 69 | 2005 |
| 495733 | 26486 | 26505 | GCTACCTGCTATGCTGAGAG | 54 | 2006 |
| 495734 | 26487 | 26506 | AGCTACCTGCTATGCTGAGA | 67 | 2007 |
| 495735 | 26488 | 26507 | AAGCTACCTGCTATGCTGAG | 44 | 2008 |
| 495736 | 26517 | 26536 | GCAGGTTCATCTGCCTTGAC | 88 | 2009 |
| 495737 | 26518 | 26537 | AGCAGGTTCATCTGCCTTGA | 75 | 2010 |
| 495738 | 26519 | 26538 | GAGCAGGTTCATCTGCCTTG | 84 | 2011 |
| 495739 | 26520 | 26539 | GGAGCAGGTTCATCTGCCTT | 80 | 2012 |
| 495740 | 26532 | 26551 | CTGTGATGCTCTGGAGCAGG | 56 | 2013 |
| 495741 | 26533 | 26552 | TCTGTGATGCTCTGGAGCAG | 49 | 2014 |
| 495742 | 26534 | 26553 | CTCTGTGATGCTCTGGAGCA | 66 | 2015 |
| 495743 | 26535 | 26554 | ACTCTGTGATGCTCTGGAGC | 74 | 2016 |
| 495744 | 26537 | 26556 | GCACTCTGTGATGCTCTGGA | 85 | 2017 |
| 495745 | 26538 | 26557 | TGCACTCTGTGATGCTCTGG | 80 | 2018 |
| 495746 | 26539 | 26558 | ATGCACTCTGTGATGCTCTG | 70 | 2019 |
| 495747 | 26540 | 26559 | AATGCACTCTGTGATGCTCT | 60 | 2020 |
| 495748 | 26626 | 26645 | TGACATGGTAAGTCCTGATG | 79 | 2021 |
| 495749 | 26627 | 26646 | CTGACATGGTAAGTCCTGAT | 86 | 2022 |
| 495750 | 26628 | 26647 | ACTGACATGGTAAGTCCTGA | 79 | 2023 |
| 495751 | 26629 | 26648 | CACTGACATGGTAAGTCCTG | 84 | 2024 |
| 495752 | 26631 | 26650 | AGCACTGACATGGTAAGTCC | 90 | 2025 |
| 495753 | 26632 | 26651 | CAGCACTGACATGGTAAGTC | 86 | 2026 |
| 495754 | 26633 | 26652 | TCAGCACTGACATGGTAAGT | 73 | 2027 |
| 495755 | 26634 | 26653 | CTCAGCACTGACATGGTAAG | 63 | 2028 |
| 495756 | 26779 | 26798 | CTGCCATTTAATGAGCTTCA | 86 | 2029 |
| 495757 | 26780 | 26799 | TCTGCCATTTAATGAGCTTC | 77 | 2030 |
| 495758 | 26781 | 26800 | CTCTGCCATTTAATGAGCTT | 50 | 2031 |
| 495759 | 26782 | 26801 | ACTCTGCCATTTAATGAGCT | 43 | 2032 |
| 495760 | 26784 | 26803 | CAACTCTGCCATTTAATGAG | 34 | 2033 |
| 495761 | 26785 | 26804 | CCAACTCTGCCATTTAATGA | 39 | 2034 |
| 495762 | 26786 | 26805 | CCCAACTCTGCCATTTAATG | 74 | 2035 |
| 495763 | 26787 | 26806 | TCCCAACTCTGCCATTTAAT | 76 | 2036 |
| 495764 | 26789 | 26808 | AATCCCAACTCTGCCATTTA | 62 | 2037 |
| 495765 | 26790 | 26809 | AAATCCCAACTCTGCCATTT | 61 | 2038 |
| 495766 | 26927 | 26946 | TTTAAGGGTTCATGGATCCC | 70 | 2039 |
| 495767 | 26928 | 26947 | TTTTAAGGGTTCATGGATCC | 48 | 2040 |
| 495768 | 26929 | 26948 | ATTTTAAGGGTTCATGGATC | 23 | 2041 |
| 495769 | 26930 | 26949 | AATTTTAAGGGTTCATGGAT | 9 | 2042 |
| 495770 | 27247 | 27266 | TGGAGTCCCTGGGTTCTTGT | 51 | 2043 |
| 495771 | 27248 | 27267 | CTGGAGTCCCTGGGTTCTTG | 52 | 2044 |
| 495772 | 27249 | 27268 | GCTGGAGTCCCTGGGTTCTT | 72 | 2045 |
| 495773 | 27250 | 27269 | GGCTGGAGTCCCTGGGTTCT | 64 | 2046 |
| 495774 | 27252 | 27271 | GAGGCTGGAGTCCCTGGGTT | 64 | 2047 |
| 495775 | 27253 | 27272 | GGAGGCTGGAGTCCCTGGGT | 45 | 2048 |
| 495776 | 27255 | 27274 | TGGGAGGCTGGAGTCCCTGG | 24 | 2049 |
| 495777 | 27353 | 27372 | TACCAGCCAGGCCCAGACCC | 8 | 2050 |
| 495778 | 27354 | 27373 | CTACCAGCCAGGCCCAGACC | 7 | 2051 |
| 495779 | 27355 | 27374 | CCTACCAGCCAGGCCCAGAC | 6 | 2052 |
| 495780 | 27356 | 27375 | CCCTACCAGCCAGGCCCAGA | 9 | 2053 |
| 495781 | 27378 | 27397 | GTGTTCTACAAGCTGCTCAG | 64 | 2054 |
| 495782 | 27379 | 27398 | GGTGTTCTACAAGCTGCTCA | 77 | 2055 |
| 495783 | 27380 | 27399 | TGGTGTTCTACAAGCTGCTC | 68 | 2056 |
| 495784 | 27381 | 27400 | CTGGTGTTCTACAAGCTGCT | 74 | 2057 |
| 495785 | 27383 | 27402 | AGCTGGTGTTCTACAAGCTG | 80 | 2058 |
| 495786 | 27384 | 27403 | GAGCTGGTGTTCTACAAGCT | 61 | 2059 |
| 495787 | 27385 | 27404 | TGAGCTGGTGTTCTACAAGC | 58 | 2060 |
| 495788 | 27386 | 27405 | GTGAGCTGGTGTTCTACAAG | 62 | 2061 |
| 495789 | 27438 | 27457 | GTCTGATCAATTATTAACCT | 71 | 2062 |
| 495790 | 27439 | 27458 | GGTCTGATCAATTATTAACC | 57 | 2063 |
| 495791 | 27440 | 27459 | GGGTCTGATCAATTATTAAC | 60 | 2064 |
| 495792 | 27441 | 27460 | TGGGTCTGATCAATTATTAA | 40 | 2065 |
| 495793 | 29674 | 29693 | CAGGTACTCATGTTTGGTGG | 63 | 2066 |
| 495794 | 29675 | 29694 | GCAGGTACTCATGTTTGGTG | 75 | 2067 |
| 495795 | 29676 | 29695 | AGCAGGTACTCATGTTTGGT | 73 | 2068 |
| 495796 | 29677 | 29696 | CAGCAGGTACTCATGTTTGG | 66 | 2069 |
| 495797 | 29679 | 29698 | GGCAGCAGGTACTCATGTTT | 60 | 2070 |
| 495798 | 29680 | 29699 | GGGCAGCAGGTACTCATGTT | 58 | 2071 |
| 495799 | 29681 | 29700 | AGGGCAGCAGGTACTCATGT | 63 | 2072 |
| 495800 | 29682 | 29701 | AAGGGCAGCAGGTACTCATG | 75 | 2073 |
| 495801 | 29778 | 29797 | CAATATCATACTATCTACAT | 11 | 2074 |
| 495802 | 29779 | 29798 | CCAATATCATACTATCTACA | 13 | 2075 |
| 495803 | 29780 | 29799 | CCCAATATCATACTATCTAC | 51 | 2076 |
| 495804 | 29781 | 29800 | CCCCAATATCATACTATCTA | 71 | 2077 |
| 495805 | 29783 | 29802 | TTCCCCAATATCATACTATC | 50 | 2078 |
| 495806 | 29825 | 29844 | AACCTTTAAGGCCTATCTCA | 32 | 2079 |
| 495807 | 29826 | 29845 | CAACCTTTAAGGCCTATCTC | 25 | 2080 |
| 413433 | 32431 | 32450 | GCCTGGACAAGTCCTGCCCA | 84 | 425 |

TABLE 32
Inhibition of DGAT2 mRNA by 5-10-5 MOE
gapmers targeting SEQ ID NO: 2

| ISIS | SEQ ID NO: 2 | SEQ ID NO: 2 | | % | SEQ |
|---|---|---|---|---|---|
| NO | Start Site | Stop Site | Sequence | inhibition | ID NO |
| 495808 | 29827 | 29846 | CCAACCTTTAAGGCCTATCT | 82 | 2081 |
| 495809 | 29828 | 29847 | CCCAACCTTTAAGGCCTATC | 90 | 2082 |
| 495810 | 29830 | 29849 | TACCCAACCTTTAAGGCCTA | 82 | 2083 |
| 495811 | 29831 | 29850 | TTACCCAACCTTTAAGGCCT | 75 | 2084 |
| 495812 | 29832 | 29851 | TTTACCCAACCTTTAAGGCC | 73 | 2085 |
| 495813 | 29833 | 29852 | TTTTACCCAACCTTTAAGGC | 70 | 2086 |
| 495814 | 29835 | 29854 | TTTTTTACCCAACCTTTAAG | 32 | 2087 |
| 495815 | 29836 | 29855 | ATTTTTTACCCAACCTTTAA | 27 | 2088 |
| 495816 | 29837 | 29856 | CATTTTTTACCCAACCTTTA | 54 | 2089 |
| 495817 | 29838 | 29857 | CCATTTTTTACCCAACCTTT | 81 | 2090 |
| 495818 | 29840 | 29859 | TTCCATTTTTTACCCAACCT | 89 | 2091 |
| 495819 | 29841 | 29860 | TTTCCATTTTTTACCCAACC | 88 | 2092 |
| 495820 | 29842 | 29861 | CTTTCCATTTTTTACCCAAC | 85 | 2093 |
| 495821 | 29843 | 29862 | TCTTTCCATTTTTTACCCAA | 74 | 2094 |
| 495822 | 30484 | 30503 | TTAGGCTTTAGAAATTCACC | 85 | 2095 |
| 495823 | 30485 | 30504 | ATTAGGCTTTAGAAATTCAC | 69 | 2096 |
| 413433 | 32431 | 32450 | GCCTGGACAAGTCCTGCCCA | 89 | 425 |
| 495824 | 32437 | 32456 | TATGCAGCCTGGACAAGTCC | 65 | 2097 |
| 495825 | 32447 | 32466 | CATACTAGACTATGCAGCCT | 91 | 2098 |
| 495826 | 32448 | 32467 | TCATACTAGACTATGCAGCC | 88 | 2099 |
| 495827 | 32449 | 32468 | ATCATACTAGACTATGCAGC | 86 | 2100 |
| 495828 | 32450 | 32469 | CATCATACTAGACTATGCAG | 82 | 2101 |
| 495829 | 32452 | 32471 | GCCATCATACTAGACTATGC | 92 | 2102 |
| 495830 | 32453 | 32472 | TGCCATCATACTAGACTATG | 81 | 2103 |
| 495831 | 32454 | 32473 | TTGCCATCATACTAGACTAT | 82 | 2104 |
| 495832 | 32455 | 32474 | GTTGCCATCATACTAGACTA | 88 | 2105 |
| 495833 | 32457 | 32476 | ATGTTGCCATCATACTAGAC | 78 | 2106 |
| 495834 | 32458 | 32477 | AATGTTGCCATCATACTAGA | 68 | 2107 |
| 495835 | 32459 | 32478 | CAATGTTGCCATCATACTAG | 85 | 2108 |
| 495836 | 32460 | 32479 | GCAATGTTGCCATCATACTA | 91 | 2109 |
| 495837 | 32462 | 32481 | TTGCAATGTTGCCATCATAC | 95 | 2110 |
| 495838 | 32463 | 32482 | GTTGCAATGTTGCCATCATA | 86 | 2111 |
| 495839 | 32464 | 32483 | GGTTGCAATGTTGCCATCAT | 94 | 2112 |
| 495840 | 32465 | 32484 | TGGTTGCAATGTTGCCATCA | 94 | 2113 |
| 495841 | 32467 | 32486 | GGTGGTTGCAATGTTGCCAT | 91 | 2114 |
| 495842 | 32468 | 32487 | TGGTGGTTGCAATGTTGCCA | 92 | 2115 |
| 495843 | 32469 | 32488 | ATGGTGGTTGCAATGTTGCC | 84 | 2116 |
| 495844 | 32470 | 32489 | GATGGTGGTTGCAATGTTGC | 82 | 2117 |
| 495845 | 32472 | 32491 | TGGATGGTGGTTGCAATGTT | 51 | 2118 |
| 495846 | 32473 | 32492 | CTGGATGGTGGTTGCAATGT | 48 | 2119 |
| 495847 | 32474 | 32493 | CCTGGATGGTGGTTGCAATG | 64 | 2120 |
| 495848 | 32475 | 32494 | GCCTGGATGGTGGTTGCAAT | 76 | 2121 |
| 495849 | 32477 | 32496 | AAGCCTGGATGGTGGTTGCA | 89 | 2122 |
| 495850 | 32478 | 32497 | TAAGCCTGGATGGTGGTTGC | 71 | 2123 |
| 495851 | 32479 | 32498 | ATAAGCCTGGATGGTGGTTG | 69 | 2124 |
| 495852 | 32480 | 32499 | AATAAGCCTGGATGGTGGTT | 85 | 2125 |
| 495853 | 32620 | 32639 | AACTGAGATCTCCAGCAGCA | 93 | 2126 |
| 495854 | 32621 | 32640 | AAACTGAGATCTCCAGCAGC | 82 | 2127 |
| 495855 | 32622 | 32641 | TAAACTGAGATCTCCAGCAG | 79 | 2128 |
| 495856 | 32623 | 32642 | TTAAACTGAGATCTCCAGCA | 81 | 2129 |
| 495857 | 32753 | 32772 | GACAAAGTCTATCAGGATGC | 90 | 2130 |
| 495858 | 32754 | 32773 | TGACAAAGTCTATCAGGATG | 67 | 2131 |
| 495859 | 32755 | 32774 | GTGACAAAGTCTATCAGGAT | 73 | 2132 |
| 495860 | 32756 | 32775 | AGTGACAAAGTCTATCAGGA | 72 | 2133 |
| 495861 | 32758 | 32777 | AAAGTGACAAAGTCTATCAG | 58 | 2134 |
| 495862 | 32759 | 32778 | GAAAGTGACAAAGTCTATCA | 67 | 2135 |
| 495863 | 32760 | 32779 | AGAAAGTGACAAAGTCTATC | 63 | 2136 |
| 495864 | 33176 | 33195 | CTAGTGCCCCAGGGAGCCCT | 63 | 2137 |
| 495865 | 33177 | 33196 | CCTAGTGCCCCAGGGAGCCC | 67 | 2138 |
| 495866 | 33178 | 33197 | TCCTAGTGCCCCAGGGAGCC | 60 | 2139 |
| 495867 | 33179 | 33198 | GTCCTAGTGCCCCAGGGAGC | 83 | 2140 |
| 495868 | 33181 | 33200 | TTGTCCTAGTGCCCCAGGGA | 87 | 2141 |
| 495869 | 33182 | 33201 | TTTGTCCTAGTGCCCCAGGG | 82 | 2142 |
| 495870 | 33183 | 33202 | TTTTGTCCTAGTGCCCCAGG | 66 | 2143 |
| 495871 | 36244 | 36263 | GTATTCTGCTCATAAAAACA | 42 | 2144 |
| 495872 | 36245 | 36264 | GGTATTCTGCTCATAAAAAC | 56 | 2145 |
| 495873 | 36246 | 36265 | GGGTATTCTGCTCATAAAAA | 72 | 2146 |
| 495874 | 36247 | 36266 | AGGGTATTCTGCTCATAAAA | 82 | 2147 |
| 495875 | 36249 | 36268 | TAAGGGTATTCTGCTCATAA | 89 | 2148 |
| 495876 | 36250 | 36269 | GTAAGGGTATTCTGCTCATA | 90 | 2149 |
| 495877 | 36251 | 36270 | AGTAAGGGTATTCTGCTCAT | 85 | 2150 |
| 495878 | 36252 | 36271 | GAGTAAGGGTATTCTGCTCA | 94 | 2151 |
| 495879 | 36259 | 36278 | AGACAATGAGTAAGGGTATT | 67 | 2152 |
| 495880 | 36260 | 36279 | GAGACAATGAGTAAGGGTAT | 47 | 2153 |
| 495881 | 36261 | 36280 | AGAGACAATGAGTAAGGGTA | 60 | 2154 |
| 495882 | 36262 | 36281 | GAGAGACAATGAGTAAGGGT | 77 | 2155 |
| 495883 | 36264 | 36283 | GAGAGAGACAATGAGTAAGG | 64 | 2156 |
| 495884 | 36265 | 36284 | TGAGAGAGACAATGAGTAAG | 31 | 2157 |

TABLE 33
Inhibition of DGAT2 mRNA by 5-10-5 MOE
gapmers targeting SEQ ID NO: 2

| ISIS | SEQ ID NO: 2 | SEQ ID NO: 2 | | % | SEQ |
|---|---|---|---|---|---|
| NO | Start Site | Stop Site | Sequence | inhibition | ID NO |
| 413433 | 32431 | 32450 | GCCTGGACAAGTCCTGCCCA | 87 | 425 |
| 495885 | 36266 | 36285 | CTGAGAGAGACAATGAGTAA | 51 | 2158 |
| 495886 | 36518 | 36537 | AGCGACAGCCCTGTGCCAGC | 67 | 2159 |
| 495887 | 36519 | 36538 | AAGCGACAGCCCTGTGCCAG | 43 | 2160 |
| 495888 | 36520 | 36539 | CAAGCGACAGCCCTGTGCCA | 15 | 2161 |
| 495889 | 36521 | 36540 | ACAAGCGACAGCCCTGTGCC | 25 | 2162 |
| 495890 | 36523 | 36542 | GGACAAGCGACAGCCCTGTG | 44 | 2163 |
| 495891 | 36524 | 36543 | AGGACAAGCGACAGCCCTGT | 42 | 2164 |
| 495892 | 36648 | 36667 | ATGAGACAGGCAGCCCACCT | 53 | 2165 |
| 495893 | 36649 | 36668 | AATGAGACAGGCAGCCCACC | 56 | 2166 |
| 495894 | 36650 | 36669 | GAATGAGACAGGCAGCCCAC | 46 | 2167 |
| 495895 | 36651 | 36670 | AGAATGAGACAGGCAGCCCA | 56 | 2168 |
| 495896 | 36653 | 36672 | ACAGAATGAGACAGGCAGCC | 42 | 2169 |
| 495897 | 36654 | 36673 | CACAGAATGAGACAGGCAGC | 47 | 2170 |
| 495898 | 36655 | 36674 | TCACAGAATGAGACAGGCAG | 24 | 2171 |
| 495899 | 36677 | 36696 | GCTCTGTGGGCTCCTCCACA | 72 | 2172 |
| 495900 | 36678 | 36697 | TGCTCTGTGGGCTCCTCCAC | 70 | 2173 |
| 495901 | 36679 | 36698 | GTGCTCTGTGGGCTCCTCCA | 76 | 2174 |
| 495902 | 36680 | 36699 | TGTGCTCTGTGGGCTCCTCC | 81 | 2175 |
| 495903 | 36682 | 36701 | CCTGTGCTCTGTGGGCTCCT | 65 | 2176 |
| 495904 | 36683 | 36702 | CCCTGTGCTCTGTGGGCTCC | 70 | 2177 |
| 495905 | 36684 | 36703 | GCCCTGTGCTCTGTGGGCTC | 31 | 2178 |
| 495906 | 36685 | 36704 | GGCCCTGTGCTCTGTGGGCT | 32 | 2179 |
| 495907 | 36687 | 36706 | TTGGCCCTGTGCTCTGTGGG | 46 | 2180 |
| 495908 | 36688 | 36707 | CTTGGCCCTGTGCTCTGTGG | 41 | 2181 |
| 495909 | 36689 | 36708 | ACTTGGCCCTGTGCTCTGTG | 66 | 2182 |
| 495910 | 36690 | 36709 | TACTTGGCCCTGTGCTCTGT | 52 | 2183 |
| 495911 | 36734 | 36753 | CACTGTCAGTCTCTCCAAAC | 75 | 2184 |
| 495912 | 36735 | 36754 | CCACTGTCAGTCTCTCCAAA | 75 | 2185 |
| 495913 | 36736 | 36755 | CCCACTGTCAGTCTCTCCAA | 60 | 2186 |
| 495914 | 36737 | 36756 | CCCCACTGTCAGTCTCTCCA | 63 | 2187 |
| 495915 | 36739 | 36758 | GCCCCCACTGTCAGTCTCTC | 48 | 2188 |
| 495916 | 36740 | 36759 | TGCCCCCACTGTCAGTCTCT | 46 | 2189 |
| 495917 | 36741 | 36760 | CTGCCCCCACTGTCAGTCTC | 55 | 2190 |
| 495918 | 36742 | 36761 | TCTGCCCCCACTGTCAGTCT | 68 | 2191 |
| 495919 | 36754 | 36773 | TTGGCTGCAAGCTCTGCCCC | 59 | 2192 |
| 495920 | 36755 | 36774 | CTTGGCTGCAAGCTCTGCCC | 63 | 2193 |
| 495921 | 36756 | 36775 | CCTTGGCTGCAAGCTCTGCC | 65 | 2194 |
| 495922 | 36757 | 36776 | GCCTTGGCTGCAAGCTCTGC | 65 | 2195 |
| 495923 | 36759 | 36778 | GGGCCTTGGCTGCAAGCTCT | 65 | 2196 |
| 495924 | 36856 | 36875 | TTATTCTAAAACTCAAATCC | 8 | 2197 |
| 495925 | 36857 | 36876 | ATTATTCTAAAACTCAAATC | 11 | 2198 |
| 495926 | 36859 | 36878 | TGATTATTCTAAAACTCAAA | 2 | 2199 |
| 495927 | 36861 | 36880 | AGTGATTATTCTAAAACTCA | 55 | 2200 |
| 495928 | 36862 | 36881 | GAGTGATTATTCTAAAACTC | 36 | 2201 |
| 495929 | 36863 | 36882 | AGAGTGATTATTCTAAAACT | 0 | 2202 |
| 495930 | 36864 | 36883 | CAGAGTGATTATTCTAAAAC | 28 | 2203 |
| 495931 | 37023 | 37042 | TGTTGGGCAGTCACCATTTG | 1 | 2204 |
| 495932 | 37024 | 37043 | GTGTTGGGCAGTCACCATTT | 17 | 2205 |
| 495933 | 37025 | 37044 | GGTGTTGGGCAGTCACCATT | 20 | 2206 |
| 495934 | 37026 | 37045 | TGGTGTTGGGCAGTCACCAT | 2 | 2207 |
| 495935 | 37185 | 37204 | CCTTGGGTCAGAGGAAACTG | 5 | 2208 |
| 495936 | 37186 | 37205 | ACCTTGGGTCAGAGGAAACT | 12 | 2209 |
| 495937 | 37187 | 37206 | GACCTTGGGTCAGAGGAAAC | 15 | 2210 |
| 495938 | 37188 | 37207 | TGACCTTGGGTCAGAGGAAA | 2 | 2211 |
| 495939 | 37190 | 37209 | GATGACCTTGGGTCAGAGGA | 18 | 2212 |
| 495940 | 37191 | 37210 | GGATGACCTTGGGTCAGAGG | 16 | 2213 |
| 495941 | 37192 | 37211 | AGGATGACCTTGGGTCAGAG | 13 | 2214 |
| 495942 | 37193 | 37212 | AAGGATGACCTTGGGTCAGA | 8 | 2215 |
| 495943 | 37195 | 37214 | GCAAGGATGACCTTGGGTCA | 26 | 2216 |
| 495944 | 37196 | 37215 | TGCAAGGATGACCTTGGGTC | 24 | 2217 |
| 495945 | 37197 | 37216 | CTGCAAGGATGACCTTGGGT | 32 | 2218 |
| 495946 | 37198 | 37217 | GCTGCAAGGATGACCTTGGG | 16 | 2219 |
| 495947 | 37200 | 37219 | CAGCTGCAAGGATGACCTTG | 7 | 2220 |
| 495948 | 37201 | 37220 | CCAGCTGCAAGGATGACCTT | 0 | 2221 |
| 495949 | 37203 | 37222 | CACCAGCTGCAAGGATGACC | 27 | 2222 |
| 495950 | 37491 | 37510 | TGTGTTGGCTCCCTGTGTCA | 38 | 2223 |
| 495951 | 37492 | 37511 | GTGTGTTGGCTCCCTGTGTC | 11 | 2224 |
| 495952 | 37493 | 37512 | GGTGTGTTGGCTCCCTGTGT | 40 | 2225 |
| 495953 | 37494 | 37513 | TGGTGTGTTGGCTCCCTGTG | 29 | 2226 |
| 495954 | 37496 | 37515 | AATGGTGTGTTGGCTCCCTG | 49 | 2227 |
| 495955 | 37497 | 37516 | GAATGGTGTGTTGGCTCCCT | 76 | 2228 |
| 495956 | 37498 | 37517 | GGAATGGTGTGTTGGCTCCC | 44 | 2229 |
| 495957 | 37499 | 37518 | AGGAATGGTGTGTTGGCTCC | 72 | 2230 |
| 495958 | 37501 | 37520 | CAAGGAATGGTGTGTTGGCT | 74 | 2231 |
| 495959 | 37502 | 37521 | CCAAGGAATGGTGTGTTGGC | 8 | 2232 |
| 495960 | 37503 | 37522 | ACCAAGGAATGGTGTGTTGG | 21 | 2233 |
| 495961 | 37504 | 37523 | CACCAAGGAATGGTGTGTTG | 18 | 2234 |

TABLE 34
Inhibition of DGAT2 mRNA by 5-10-5 MOE
gapmers targeting SEQ ID NO: 2

| ISIS | SEQ ID NO: 2 | SEQ ID NO: 2 | | % | SEQ |
|---|---|---|---|---|---|
| NO | Start Site | Stop Site | Sequence | inhibition | ID NO |
| 423460 | 32428 | 32447 | TGGACAAGTCCTGCCCATCT | 65 | 464 |
| 423461 | 32429 | 32448 | CTGGACAAGTCCTGCCCATC | 70 | 465 |
| 423462 | 32430 | 32449 | CCTGGACAAGTCCTGCCCAT | 54 | 466 |
| 413433 | 32431 | 32450 | GCCTGGACAAGTCCTGCCCA | 80 | 425 |
| 495962 | 37506 | 37525 | AGCACCAAGGAATGGTGTGT | 6 | 2235 |
| 495963 | 37507 | 37526 | CAGCACCAAGGAATGGTGTG | 19 | 2236 |
| 495964 | 37508 | 37527 | CCAGCACCAAGGAATGGTGT | 13 | 2237 |
| 495965 | 37509 | 37528 | CCCAGCACCAAGGAATGGTG | 26 | 2238 |
| 495966 | 37511 | 37530 | GGCCCAGCACCAAGGAATGG | 14 | 2239 |
| 495967 | 37512 | 37531 | AGGCCCAGCACCAAGGAATG | 4 | 2240 |
| 495968 | 37513 | 37532 | CAGGCCCAGCACCAAGGAAT | 8 | 2241 |
| 495969 | 37514 | 37533 | GCAGGCCCAGCACCAAGGAA | 33 | 2242 |
| 495970 | 37516 | 37535 | ATGCAGGCCCAGCACCAAGG | 33 | 2243 |
| 495971 | 37517 | 37536 | AATGCAGGCCCAGCACCAAG | 14 | 2244 |
| 495972 | 37518 | 37537 | CAATGCAGGCCCAGCACCAA | 16 | 2245 |
| 495973 | 37519 | 37538 | CCAATGCAGGCCCAGCACCA | 45 | 2246 |
| 495974 | 40192 | 40211 | CTGAACTTCCCCTCCCAAAC | 16 | 2247 |
| 495975 | 40197 | 40216 | CAAATCTGAACTTCCCCTCC | 0 | 2248 |
| 495976 | 40202 | 40221 | AAATGCAAATCTGAACTTCC | 30 | 2249 |
| 495977 | 40223 | 40242 | GCAGCTCCAAGGATCATTTT | 44 | 2250 |
| 495978 | 40228 | 40247 | ATCCAGCAGCTCCAAGGATC | 45 | 2251 |
| 495979 | 40233 | 40252 | CTTCCATCCAGCAGCTCCAA | 51 | 2252 |
| 495980 | 40238 | 40257 | CCCATCTTCCATCCAGCAGC | 49 | 2253 |
| 495981 | 40243 | 40262 | TCTAACCCATCTTCCATCCA | 28 | 2254 |
| 495982 | 40248 | 40267 | ATTTTTCTAACCCATCTTCC | 21 | 2255 |
| 495983 | 40253 | 40272 | CTTCCATTTTTCTAACCCAT | 64 | 2256 |
| 495984 | 40293 | 40312 | GCCACTGGCTACCAAAACAG | 37 | 2257 |
| 495985 | 40298 | 40317 | TCCAAGCCACTGGCTACCAA | 41 | 2258 |
| 495986 | 40303 | 40322 | CTTGGTCCAAGCCACTGGCT | 43 | 2259 |
| 495987 | 40308 | 40327 | ACTCCCTTGGTCCAAGCCAC | 44 | 2260 |
| 495988 | 40313 | 40332 | CTGCTACTCCCTTGGTCCAA | 40 | 2261 |
| 495989 | 40318 | 40337 | CTCCACTGCTACTCCCTTGG | 11 | 2262 |
| 495990 | 40323 | 40342 | TCCATCTCCACTGCTACTCC | 39 | 2263 |
| 495991 | 40328 | 40347 | TCTCTTCCATCTCCACTGCT | 36 | 2264 |
| 495992 | 40333 | 40352 | GCACATCTCTTCCATCTCCA | 82 | 2265 |
| 495993 | 40338 | 40357 | ATCATGCACATCTCTTCCAT | 39 | 2266 |
| 495994 | 40359 | 40378 | TATTTCTGAAATTTTTCCCA | 17 | 2267 |
| 495995 | 40364 | 40383 | AATGCTATTTCTGAAATTTT | 10 | 2268 |
| 495996 | 40386 | 40405 | CAATCCATTCCTATGTCCTG | 24 | 2269 |
| 495997 | 40391 | 40410 | ATACCCAATCCATTCCTATG | 13 | 2270 |
| 495998 | 40396 | 40415 | TCTCCATACCCAATCCATTC | 45 | 2271 |
| 495999 | 40401 | 40420 | CTGCATCTCCATACCCAATC | 59 | 2272 |
| 496000 | 40406 | 40425 | TCCTGCTGCATCTCCATACC | 38 | 2273 |
| 496001 | 40411 | 40430 | TCTTATCCTGCTGCATCTCC | 15 | 2274 |
| 496002 | 40416 | 40435 | TATTTTCTTATCCTGCTGCA | 46 | 2275 |
| 496003 | 40421 | 40440 | TGCTTTATTTTCTTATCCTG | 47 | 2276 |
| 496004 | 40444 | 40463 | ACCAGCATTTATGATCTGTG | 67 | 2277 |
| 496005 | 40807 | 40826 | GACATGCTTTAAAAAGTGTA | 25 | 2278 |
| 496006 | 40812 | 40831 | AATGTGACATGCTTTAAAAA | 23 | 2279 |
| 496007 | 40899 | 40918 | AGCCATTCCTGCCTCTCTGA | 12 | 2280 |
| 496008 | 40904 | 40923 | GGGCAAGCCATTCCTGCCTC | 5 | 2281 |
| 496009 | 40909 | 40928 | GCTCTGGGCAAGCCATTCCT | 60 | 2282 |
| 496010 | 40914 | 40933 | GCTCTGCTCTGGGCAAGCCA | 66 | 2283 |
| 496011 | 40919 | 40938 | CTTTTGCTCTGCTCTGGGCA | 50 | 2284 |
| 496012 | 40924 | 40943 | CTTTGCTTTTGCTCTGCTCT | 67 | 2285 |
| 496013 | 40929 | 40948 | AACATCTTTGCTTTTGCTCT | 59 | 2286 |
| 496014 | 40934 | 40953 | AAGTAAACATCTTTGCTTTT | 15 | 2287 |
| 496015 | 40939 | 40958 | GGATCAAGTAAACATCTTTG | 42 | 2288 |
| 496016 | 40967 | 40986 | TCTGCTAGGAGGGTCTATGA | 20 | 2289 |
| 496017 | 40972 | 40991 | TGCATTCTGCTAGGAGGGTC | 39 | 2290 |
| 496018 | 40977 | 40996 | CCCACTGCATTCTGCTAGGA | 27 | 2291 |
| 496019 | 40982 | 41001 | TTGAACCCACTGCATTCTGC | 6 | 2292 |
| 496020 | 40987 | 41006 | ACTGGTTGAACCCACTGCAT | 0 | 2293 |
| 496021 | 40992 | 41011 | TCAAGACTGGTTGAACCCAC | 8 | 2294 |
| 496022 | 40997 | 41016 | TGGGATCAAGACTGGTTGAA | 0 | 2295 |
| 496023 | 41002 | 41021 | GCAGATGGGATCAAGACTGG | 0 | 2296 |
| 496024 | 41007 | 41026 | AAGCTGCAGATGGGATCAAG | 0 | 2297 |
| 496025 | 41012 | 41031 | GTGCTAAGCTGCAGATGGGA | 39 | 2298 |
| 496026 | 41043 | 41062 | GCATGTGAAGGGACCCACCC | 14 | 2299 |
| 496027 | 41064 | 41083 | TGAAAAGACTGAGGCCCAGG | 1 | 2300 |
| 496028 | 41069 | 41088 | ACAGATGAAAAGACTGAGGC | 21 | 2301 |
| 496029 | 41074 | 41093 | CTATTACAGATGAAAAGACT | 0 | 2302 |
| 496030 | 41079 | 41098 | GTCCCCTATTACAGATGAAA | 34 | 2303 |
| 496031 | 41084 | 41103 | TGGTTGTCCCCTATTACAGA | 39 | 2304 |
| 496032 | 41089 | 41108 | ATCTCTGGTTGTCCCCTATT | 21 | 2305 |
| 496033 | 41094 | 41113 | GCTGCATCTCTGGTTGTCCC | 65 | 2306 |
| 496034 | 41099 | 41118 | TATGTGCTGCATCTCTGGTT | 51 | 2307 |
| 496035 | 42398 | 42417 | TCTCACTTTCATTTATTTTC | 70 | 2308 |

TABLE 35
Inhibition of DGAT2 mRNA by 5-10-5 MOE
gapmers targeting SEQ ID NO: 2

| ISIS | SEQ ID NO: 2 | SEQ ID NO: 2 | | % | SEQ |
|---|---|---|---|---|---|
| NO | Start Site | Stop Site | Sequence | inhibition | ID NO |
| 501381 | 24794 | 24813 | GCTTCAGGCAGCCTGAAGGA | 46 | 2309 |
| 501382 | 24799 | 24818 | AGTGAGCTTCAGGCAGCCTG | 75 | 2310 |
| 501383 | 24823 | 24842 | GCTTCCCCAAAGGGCCCAGT | 70 | 2311 |
| 501384 | 24828 | 24847 | CCTTTGCTTCCCCAAAGGGC | 71 | 2312 |
| 501385 | 24878 | 24897 | CCTCATCTCAGTGCCCAAAG | 90 | 2313 |
| 501386 | 25018 | 25037 | AGCATCCCCAATCCCTGCTC | 65 | 2314 |
| 501387 | 25023 | 25042 | CTTTGAGCATCCCCAATCCC | 91 | 2315 |
| 501388 | 25028 | 25047 | GTGTACTTTGAGCATCCCCA | 82 | 2316 |
| 501389 | 25033 | 25052 | TCCAAGTGTACTTTGAGCAT | 85 | 2317 |
| 501390 | 25069 | 25088 | AGAGGTTCAACATCCAATTT | 81 | 2318 |
| 501391 | 25075 | 25094 | AAGGACAGAGGTTCAACATC | 88 | 2319 |
| 501392 | 25080 | 25099 | AGGCCAAGGACAGAGGTTCA | 82 | 2320 |
| 501393 | 25085 | 25104 | CTGTGAGGCCAAGGACAGAG | 88 | 2321 |
| 501394 | 25090 | 25109 | TCTGTCTGTGAGGCCAAGGA | 77 | 2322 |
| 501395 | 25095 | 25114 | TGCTATCTGTCTGTGAGGCC | 77 | 2323 |
| 501396 | 25183 | 25202 | GTCTCTCATAATTGCCAGTT | 82 | 2324 |
| 501397 | 25188 | 25207 | GGGAAGTCTCTCATAATTGC | 67 | 2325 |
| 501398 | 25193 | 25212 | GCCTTGGGAAGTCTCTCATA | 85 | 2326 |
| 501399 | 25198 | 25217 | GCTAGGCCTTGGGAAGTCTC | 76 | 2327 |
| 501400 | 25226 | 25245 | TGAAGTATCTAAAGAGGCTA | 71 | 2328 |
| 501401 | 25231 | 25250 | CCACATGAAGTATCTAAAGA | 74 | 2329 |
| 501402 | 25236 | 25255 | GGAGACCACATGAAGTATCT | 75 | 2330 |
| 501403 | 25241 | 25260 | ATTTTGGAGACCACATGAAG | 68 | 2331 |
| 501404 | 25246 | 25265 | GGGTCATTTTGGAGACCACA | 91 | 2332 |
| 501405 | 25267 | 25286 | ATGGGAATGGTATCGCACTC | 85 | 2333 |
| 501406 | 25272 | 25291 | ACACAATGGGAATGGTATCG | 80 | 2334 |
| 501407 | 25297 | 25316 | CCCCTGTGCCCTGGTTTCTA | 49 | 2335 |
| 501408 | 25302 | 25321 | ATGCTCCCCTGTGCCCTGGT | 44 | 2336 |
| 501409 | 25307 | 25326 | TCTGCATGCTCCCCTGTGCC | 44 | 2337 |
| 501410 | 25312 | 25331 | GGCTGTCTGCATGCTCCCCT | 76 | 2338 |
| 501411 | 25375 | 25394 | CTATAGAATCAGACAGACCT | 83 | 2339 |
| 501412 | 25380 | 25399 | ATCAGCTATAGAATCAGACA | 90 | 2340 |
| 501413 | 25424 | 25443 | CAAACCTCACCTCCCACAGG | 33 | 2341 |
| 501414 | 25429 | 25448 | CAGTACAAACCTCACCTCCC | 70 | 2342 |
| 501415 | 25468 | 25487 | TCAGTCCACTGTCACCCTTC | 33 | 2343 |
| 501416 | 25473 | 25492 | AGATGTCAGTCCACTGTCAC | 13 | 2344 |
| 501417 | 25478 | 25497 | AGGGAAGATGTCAGTCCACT | 0 | 2345 |
| 501418 | 25483 | 25502 | AGCAGAGGGAAGATGTCAGT | 0 | 2346 |
| 501419 | 25489 | 25508 | GCCTACAGCAGAGGGAAGAT | 29 | 2347 |
| 501420 | 25494 | 25513 | CCAGTGCCTACAGCAGAGGG | 38 | 2348 |
| 501421 | 25499 | 25518 | TGGATCCAGTGCCTACAGCA | 41 | 2349 |
| 501422 | 25505 | 25524 | GGATGCTGGATCCAGTGCCT | 74 | 2350 |
| 501423 | 25618 | 25637 | ACCCAGTACAAGGAAGGACA | 78 | 2351 |
| 501424 | 25623 | 25642 | AGCTTACCCAGTACAAGGAA | 31 | 2352 |
| 501425 | 25628 | 25647 | GGCCCAGCTTACCCAGTACA | 48 | 2353 |
| 501426 | 25717 | 25736 | CTCTTATTCCCTCACCCCTG | 77 | 2354 |
| 501427 | 25782 | 25801 | CACTTGATCTGGGACCCAAA | 96 | 2355 |
| 501428 | 25787 | 25806 | TAGAGCACTTGATCTGGGAC | 80 | 2356 |
| 501429 | 25841 | 25860 | ACTATCACACCACCTCCCAC | 85 | 2357 |
| 501430 | 25846 | 25865 | TGGGAACTATCACACCACCT | 95 | 2358 |
| 501431 | 25851 | 25870 | GTAAATGGGAACTATCACAC | 64 | 2359 |
| 501432 | 25856 | 25875 | CATCTGTAAATGGGAACTAT | 49 | 2360 |
| 501433 | 25861 | 25880 | TTTCCCATCTGTAAATGGGA | 0 | 2361 |
| 501434 | 25866 | 25885 | TGAGGTTTCCCATCTGTAAA | 61 | 2362 |
| 501435 | 25900 | 25919 | GACCTTGGGCAAGTTACCTA | 88 | 2363 |
| 501436 | 25905 | 25924 | TGTGTGACCTTGGGCAAGTT | 82 | 2364 |
| 501437 | 25910 | 25929 | AAATCTGTGTGACCTTGGGC | 67 | 2365 |
| 501438 | 25915 | 25934 | GATTCAAATCTGTGTGACCT | 89 | 2366 |
| 501439 | 25920 | 25939 | ACAGGGATTCAAATCTGTGT | 73 | 2367 |
| 501440 | 25950 | 25969 | GGAAAGGCACAGGCTTTGGG | 88 | 2368 |
| 501441 | 25981 | 26000 | AATGTCTGTTGGTGGGCAGG | 77 | 2369 |
| 501442 | 26005 | 26024 | GGCAAAGTAACATACCTGCT | 94 | 2370 |
| 501443 | 26010 | 26029 | CTTAAGGCAAAGTAACATAC | 91 | 2371 |
| 501444 | 26069 | 26088 | TGTAAGGTCACAGAGCTTGT | 54 | 2372 |
| 501445 | 26102 | 26121 | GGAAACTAACACTCAGAGAG | 70 | 2373 |
| 501446 | 26107 | 26126 | AATGAGGAAACTAACACTCA | 62 | 2374 |
| 501447 | 26165 | 26184 | TTTCTTATCTTCAATCCTCA | 95 | 2375 |
| 501448 | 26170 | 26189 | TCTCATTTCTTATCTTCAAT | 92 | 2376 |
| 501449 | 26175 | 26194 | GGTGCTCTCATTTCTTATCT | 81 | 2377 |
| 501450 | 26200 | 26219 | CCCATCATGACCAGGCCCTG | 91 | 2378 |
| 501451 | 26300 | 26319 | AGGCCTCGGGAAGCACCTGG | 89 | 2379 |
| 501452 | 26305 | 26324 | GGAGCAGGCCTCGGGAAGCA | 90 | 2380 |
| 501453 | 26331 | 26350 | ATGTGGGCTGTGCTGAGAGA | 64 | 2381 |
| 501454 | 26353 | 26372 | AGAAAAAGCAACCAAAGCAC | 89 | 2382 |
| 501455 | 26358 | 26377 | CCTGCAGAAAAAGCAACCAA | 81 | 2383 |
| 501456 | 26363 | 26382 | CCAGACCTGCAGAAAAAGCA | 76 | 2384 |
| 501457 | 26385 | 26404 | CCTAAGGAGTGAGGGTATCT | 79 | 2385 |
| 413433 | 32431 | 32450 | GCCTGGACAAGTCCTGCCCA | 48 | 425 |

TABLE 36
Inhibition of DGAT2 mRNA by 5-10-5 MOE
gapmers targeting SEQ ID NO: 2

| ISIS | SEQ ID NO: 2 | SEQ ID NO: 2 | | % | SEQ |
|---|---|---|---|---|---|
| NO | Start Site | Stop Site | Sequence | inhibition | ID NO |
| 501303 | 23656 | 23675 | CTCTGAGTGCAAAGGCTCTG | 40 | 2386 |
| 501304 | 23661 | 23680 | AGCAGCTCTGAGTGCAAAGG | 48 | 2387 |
| 501305 | 23666 | 23685 | CCCAGAGCAGCTCTGAGTGC | 45 | 2388 |
| 501306 | 23671 | 23690 | CTTTCCCCAGAGCAGCTCTG | 25 | 2389 |
| 501307 | 23694 | 23713 | TGACCCTGCTTAGAGGACCT | 29 | 2390 |
| 501308 | 23699 | 23718 | ATTCCTGACCCTGCTTAGAG | 5 | 2391 |
| 501309 | 23704 | 23723 | CCAGCATTCCTGACCCTGCT | 14 | 2392 |
| 501310 | 23709 | 23728 | GAAACCCAGCATTCCTGACC | 18 | 2393 |
| 501311 | 23714 | 23733 | GGACTGAAACCCAGCATTCC | 11 | 2394 |
| 501312 | 23719 | 23738 | AGCCAGGACTGAAACCCAGC | 34 | 2395 |
| 501313 | 23724 | 23743 | GGCAGAGCCAGGACTGAAAC | 47 | 2396 |
| 501314 | 23729 | 23748 | TAGGCGGCAGAGCCAGGACT | 43 | 2397 |
| 501315 | 23734 | 23753 | GGCAGTAGGCGGCAGAGCCA | 28 | 2398 |
| 501316 | 23770 | 23789 | ACCAGAGACAGGCACTGACT | 59 | 2399 |
| 501317 | 23792 | 23811 | TGGACAGCCAGGGAGACTGG | 36 | 2400 |
| 501318 | 23797 | 23816 | CTAATTGGACAGCCAGGGAG | 20 | 2401 |
| 501319 | 23802 | 23821 | ATAGCCTAATTGGACAGCCA | 63 | 2402 |
| 501320 | 23807 | 23826 | CCAGTATAGCCTAATTGGAC | 40 | 2403 |
| 501321 | 23813 | 23832 | GGTCATCCAGTATAGCCTAA | 53 | 2404 |
| 501322 | 23855 | 23874 | GACTTGCCCAGCAACCCATC | 65 | 2405 |
| 501323 | 23860 | 23879 | CTCCAGACTTGCCCAGCAAC | 28 | 2406 |
| 501324 | 23865 | 23884 | CCCACCTCCAGACTTGCCCA | 26 | 2407 |
| 501325 | 23870 | 23889 | ACTTTCCCACCTCCAGACTT | 18 | 2408 |
| 501326 | 23875 | 23894 | ATAGGACTTTCCCACCTCCA | 61 | 2409 |
| 501327 | 23880 | 23899 | CCTTCATAGGACTTTCCCAC | 56 | 2410 |
| 501328 | 23885 | 23904 | TCCTACCTTCATAGGACTTT | 40 | 2411 |
| 501329 | 23890 | 23909 | AAAAATCCTACCTTCATAGG | 0 | 2412 |
| 501330 | 23921 | 23940 | TGCCTCATAATTGCTCCTTC | 49 | 2413 |
| 501331 | 23926 | 23945 | AGGTCTGCCTCATAATTGCT | 8 | 2414 |
| 501332 | 23931 | 23950 | TCCAGAGGTCTGCCTCATAA | 64 | 2415 |
| 501333 | 23957 | 23976 | ATAAAGAGGCTGGGCCATAG | 8 | 2416 |
| 501334 | 23981 | 24000 | CAGGATGTGAACTCACAAAA | 59 | 2417 |
| 501335 | 24024 | 24043 | GTAGCATCTAATAACACCAC | 61 | 2418 |
| 501336 | 24029 | 24048 | GTTCAGTAGCATCTAATAAC | 59 | 2419 |
| 501337 | 24034 | 24053 | TGGGTGTTCAGTAGCATCTA | 50 | 2420 |
| 501338 | 24089 | 24108 | TATGTGACCCCAGGCAAGCT | 32 | 2421 |
| 501339 | 24094 | 24113 | CTCACTATGTGACCCCAGGC | 59 | 2422 |
| 501340 | 24099 | 24118 | TTCTACTCACTATGTGACCC | 56 | 2423 |
| 501341 | 24104 | 24123 | TTTGGTTCTACTCACTATGT | 57 | 2424 |
| 501342 | 24109 | 24128 | CAGACTTTGGTTCTACTCAC | 63 | 2425 |
| 501343 | 24114 | 24133 | AGGTTCAGACTTTGGTTCTA | 58 | 2426 |
| 501344 | 24119 | 24138 | AACCTAGGTTCAGACTTTGG | 59 | 2427 |
| 501345 | 24124 | 24143 | AGTCAAACCTAGGTTCAGAC | 68 | 2428 |
| 501346 | 24129 | 24148 | AGAAGAGTCAAACCTAGGTT | 56 | 2429 |
| 501347 | 24134 | 24153 | TTAGCAGAAGAGTCAAACCT | 38 | 2430 |
| 501348 | 24139 | 24158 | TTAGTTTAGCAGAAGAGTCA | 36 | 2431 |
| 501349 | 24164 | 24183 | GTGTGATGCATCAGAGGGAA | 40 | 2432 |
| 501350 | 24169 | 24188 | CCCTGGTGTGATGCATCAGA | 50 | 2433 |
| 501351 | 24174 | 24193 | CCTTTCCCTGGTGTGATGCA | 53 | 2434 |
| 501352 | 24197 | 24216 | AAATGCTAGGCCTCAAGATG | 17 | 2435 |
| 501353 | 24202 | 24221 | GAAGGAAATGCTAGGCCTCA | 64 | 2436 |
| 501354 | 24207 | 24226 | GGAAGGAAGGAAATGCTAGG | 31 | 2437 |
| 501355 | 24212 | 24231 | TAGGAGGAAGGAAGGAAATG | 11 | 2438 |
| 501356 | 24217 | 24236 | ACTTTTAGGAGGAAGGAAGG | 0 | 2439 |
| 501357 | 24222 | 24241 | CTTTGACTTTTAGGAGGAAG | 60 | 2440 |
| 501358 | 24227 | 24246 | AACTGCTTTGACTTTTAGGA | 39 | 2441 |
| 501359 | 24232 | 24251 | TTAACAACTGCTTTGACTTT | 30 | 2442 |
| 501360 | 24237 | 24256 | GAAAGTTAACAACTGCTTTG | 37 | 2443 |
| 501361 | 24447 | 24466 | TACCATCTGCTCTGTGAAAG | 21 | 2444 |
| 501362 | 24452 | 24471 | CTTCATACCATCTGCTCTGT | 29 | 2445 |
| 501363 | 24483 | 24502 | CAAGCACCTACTGTGTGCCC | 13 | 2446 |
| 501364 | 24488 | 24507 | TTCACCAAGCACCTACTGTG | 21 | 2447 |
| 501365 | 24493 | 24512 | ACATCTTCACCAAGCACCTA | 0 | 2448 |
| 501366 | 24516 | 24535 | CCACTACATGCCCTTTGCTC | 51 | 2449 |
| 501367 | 24557 | 24576 | CTGAAGAAGTGGGCCACCTC | 52 | 2450 |
| 501368 | 24582 | 24601 | ACCCATACCCCATTCCTTCC | 22 | 2451 |
| 501369 | 24587 | 24606 | TCCTCACCCATACCCCATTC | 9 | 2452 |
| 501370 | 24636 | 24655 | AGCCTGGTGACTGCAGGAGA | 61 | 2453 |
| 501371 | 24641 | 24660 | CAGGAAGCCTGGTGACTGCA | 45 | 2454 |
| 501372 | 24666 | 24685 | TCCAGCAGCTGATGGGCAGT | 43 | 2455 |
| 501373 | 24671 | 24690 | TGGACTCCAGCAGCTGATGG | 19 | 2456 |
| 501374 | 24695 | 24714 | CTTGGTGCCCCTAGGATGAC | 33 | 2457 |
| 501375 | 24700 | 24719 | ATTGGCTTGGTGCCCCTAGG | 8 | 2458 |
| 501376 | 24705 | 24724 | ACTTAATTGGCTTGGTGCCC | 36 | 2459 |
| 501377 | 24774 | 24793 | CACTGAGGGCTGTAATTATG | 21 | 2460 |
| 501378 | 24779 | 24798 | AAGGACACTGAGGGCTGTAA | 24 | 2461 |
| 501379 | 24784 | 24803 | GCCTGAAGGACACTGAGGGC | 2 | 2462 |
| 501380 | 24789 | 24808 | AGGCAGCCTGAAGGACACTG | 14 | 2463 |
| 413433 | 32431 | 32450 | GCCTGGACAAGTCCTGCCCA | 81 | 425 |

TABLE 37
Inhibition of DGAT2 mRNA by 5-10-5
MOE gapmers targeting SEQ ID NO: 2

| ISIS | SEQ ID NO: 2 | SEQ ID NO: 2 | | % | SEQ |
|---|---|---|---|---|---|
| NO | Start Site | Stop Site | Sequence | inhibition | ID NO |
| 501226 | 21041 | 21060 | TGTTCCTGACTCCTGGGTGG | 26 | 2464 |
| 501227 | 21046 | 21065 | CTGACTGTTCCTGACTCCTG | 61 | 2465 |
| 501228 | 21091 | 21110 | TGCTGCAATCAGATGCCACC | 65 | 2466 |
| 501229 | 21096 | 21115 | GCCGATGCTGCAATCAGATG | 68 | 2467 |
| 501230 | 21101 | 21120 | GGGATGCCGATGCTGCAATC | 69 | 2468 |
| 501231 | 21119 | 21138 | GTCCAGCAGAAGCTGGTGGG | 19 | 2469 |
| 501232 | 21124 | 21143 | GAGGAGTCCAGCAGAAGCTG | 15 | 2470 |
| 501233 | 21129 | 21148 | GCTGGGAGGAGTCCAGCAGA | 12 | 2471 |
| 501234 | 21134 | 21153 | CTGTGGCTGGGAGGAGTCCA | 14 | 2472 |
| 501235 | 21139 | 21158 | CCCAGCTGTGGCTGGGAGGA | 0 | 2473 |
| 501236 | 21144 | 21163 | TCTGCCCCAGCTGTGGCTGG | 0 | 2474 |
| 501237 | 21149 | 21168 | CTTCCTCTGCCCCAGCTGTG | 41 | 2475 |
| 501238 | 21154 | 21173 | CAGTACTTCCTCTGCCCCAG | 40 | 2476 |
| 501239 | 21159 | 21178 | GCTGTCAGTACTTCCTCTGC | 50 | 2477 |
| 501240 | 21164 | 21183 | ACCTGGCTGTCAGTACTTCC | 70 | 2478 |
| 501241 | 21169 | 21188 | TTGCCACCTGGCTGTCAGTA | 68 | 2479 |
| 501242 | 21174 | 21193 | AGTCCTTGCCACCTGGCTGT | 50 | 2480 |
| 501243 | 21179 | 21198 | CTGCCAGTCCTTGCCACCTG | 53 | 2481 |
| 501244 | 21184 | 21203 | AAACACTGCCAGTCCTTGCC | 63 | 2482 |
| 501245 | 21213 | 21232 | GGAAGTGAGGGTTCAGTTGG | 30 | 2483 |
| 501246 | 21369 | 21388 | CTCTCTGGGCTTCAGTTTCC | 45 | 2484 |
| 501247 | 21374 | 21393 | CTCACCTCTCTGGGCTTCAG | 61 | 2485 |
| 501248 | 21379 | 21398 | GTCTCCTCACCTCTCTGGGC | 61 | 2486 |
| 501249 | 21384 | 21403 | GCTAAGTCTCCTCACCTCTC | 71 | 2487 |
| 501250 | 21490 | 21509 | ATCTGTTTTCCTTCAGAGGG | 55 | 2488 |
| 501251 | 21565 | 21584 | TTCCTTCTCTCTGCTCCCCA | 55 | 2489 |
| 501252 | 21570 | 21589 | CCAAGTTCCTTCTCTCTGCT | 15 | 2490 |
| 501253 | 21575 | 21594 | TGTCCCCAAGTTCCTTCTCT | 32 | 2491 |
| 501254 | 21659 | 21678 | GGTCAAGGTCACTCAGCCAG | 62 | 2492 |
| 501255 | 21681 | 21700 | CCCTATTTTGATGGTGATAC | 57 | 2493 |
| 501256 | 21708 | 21727 | TGGACTCCTGTGAGTTTGGC | 67 | 2494 |
| 501257 | 21713 | 21732 | GCACTTGGACTCCTGTGAGT | 25 | 2495 |
| 501258 | 21718 | 21737 | CACAGGCACTTGGACTCCTG | 27 | 2496 |
| 501259 | 21723 | 21742 | CCTTGCACAGGCACTTGGAC | 18 | 2497 |
| 501260 | 21728 | 21747 | CATGCCCTTGCACAGGCACT | 14 | 2498 |
| 501261 | 21733 | 21752 | CCCTCCATGCCCTTGCACAG | 29 | 2499 |
| 501262 | 21755 | 21774 | AGGCCCATAAAGCTTTGGGA | 49 | 2500 |
| 501263 | 21760 | 21779 | ACAAGAGGCCCATAAAGCTT | 26 | 2501 |
| 501264 | 21765 | 21784 | GATGCACAAGAGGCCCATAA | 65 | 2502 |
| 501265 | 21770 | 21789 | GGTATGATGCACAAGAGGCC | 58 | 2503 |
| 501266 | 21821 | 21840 | CTGGCCACTCTTCAGGCCCC | 32 | 2504 |
| 501267 | 21826 | 21845 | GTGCTCTGGCCACTCTTCAG | 0 | 2505 |
| 501268 | 21873 | 21892 | GATCCATATCTGGATCCCCA | 2 | 2506 |
| 501269 | 21878 | 21897 | GGTCTGATCCATATCTGGAT | 20 | 2507 |
| 501270 | 21933 | 21952 | GCTGATTACAAGCTGATTCT | 77 | 2508 |
| 501271 | 21938 | 21957 | TAACTGCTGATTACAAGCTG | 39 | 2509 |
| 501272 | 21996 | 22015 | ACAATGGAGAAACAAAAGAG | 6 | 2510 |
| 501273 | 22019 | 22038 | TTTGAAGATAAAGTCAGACC | 35 | 2511 |
| 501274 | 22075 | 22094 | GTCTATGCAGGCCTGGAATT | 54 | 2512 |
| 501275 | 22080 | 22099 | CTAAGGTCTATGCAGGCCTG | 53 | 2513 |
| 501276 | 22085 | 22104 | AAACACTAAGGTCTATGCAG | 32 | 2514 |
| 501277 | 22090 | 22109 | ATGATAAACACTAAGGTCTA | 43 | 2515 |
| 501278 | 22095 | 22114 | CTGGGATGATAAACACTAAG | 53 | 2516 |
| 501279 | 22100 | 22119 | CTTCTCTGGGATGATAAACA | 0 | 2517 |
| 501280 | 22105 | 22124 | CTTTCCTTCTCTGGGATGAT | 0 | 2518 |
| 501281 | 22126 | 22145 | AAGCCTTTGGAAAGAGAAGG | 31 | 2519 |
| 501282 | 22131 | 22150 | CCAGGAAGCCTTTGGAAAGA | 31 | 2520 |
| 501283 | 22136 | 22155 | GTCTTCCAGGAAGCCTTTGG | 51 | 2521 |
| 501284 | 22141 | 22160 | CAGCAGTCTTCCAGGAAGCC | 54 | 2522 |
| 501285 | 22146 | 22165 | TAAGGCAGCAGTCTTCCAGG | 59 | 2523 |
| 501286 | 22151 | 22170 | GGTGATAAGGCAGCAGTCTT | 56 | 2524 |
| 501287 | 22156 | 22175 | GAGATGGTGATAAGGCAGCA | 78 | 2525 |
| 501288 | 22162 | 22181 | AACCCAGAGATGGTGATAAG | 23 | 2526 |
| 501289 | 22167 | 22186 | TTCAAAACCCAGAGATGGTG | 64 | 2527 |
| 501290 | 22172 | 22191 | CATCCTTCAAAACCCAGAGA | 62 | 2528 |
| 501291 | 22194 | 22213 | CTGATAATGAGATAAAGCAA | 3 | 2529 |
| 501292 | 22231 | 22250 | CAGAGGCCCTTCCCTGCTTT | 42 | 2530 |
| 501293 | 22266 | 22285 | TGGGAGCCCCCAGTCCACCT | 48 | 2531 |
| 501294 | 22271 | 22290 | GCCAGTGGGAGCCCCCAGTC | 0 | 2532 |
| 501295 | 22311 | 22330 | TGGCCTGGGAGCTGGCCTGG | 13 | 2533 |
| 501296 | 22349 | 22368 | CTCTCAGGCAATCCCAACCT | 27 | 2534 |
| 501297 | 22354 | 22373 | AGGCCCTCTCAGGCAATCCC | 62 | 2535 |
| 501298 | 22359 | 22378 | GGCCCAGGCCCTCTCAGGCA | 34 | 2536 |
| 501299 | 22364 | 22383 | TCTCAGGCCCAGGCCCTCTC | 27 | 2537 |
| 501300 | 22403 | 22422 | CTCCTGGAGAGGGAAGCTGG | 31 | 2538 |
| 501301 | 22408 | 22427 | GGAGGCTCCTGGAGAGGGAA | 0 | 2539 |
| 501302 | 22413 | 22432 | AGTTGGGAGGCTCCTGGAGA | 0 | 2540 |
| 413433 | 32431 | 32450 | GCCTGGACAAGTCCTGCCCA | 80 | 425 |

TABLE 38
Inhibition of DGAT2 mRNA by 5-10-5 MOE
gapmers targeting SEQ ID NO: 2

| ISIS | SEQ ID NO: 2 | SEQ ID NO: 2 | | % | SEQ |
|---|---|---|---|---|---|
| NO | Start Site | Stop Site | Sequence | inhibition | ID NO |
| 484013 | 18880 | 18899 | CAGAGGCAGCTATAGGCCTG | 43 | 1299 |
| | 20790 | 20809 | | | |
| 495657 | 18871 | 18890 | CTATAGGCCTGGATGCCCAA | 72 | 1930 |
| | 20781 | 20800 | | | |
| 501152 | 19132 | 19151 | GCTGGAACAAAGCCTTGCAG | 52 | 2541 |
| 501153 | 19261 | 19280 | AAGAAGAGGTCGCAGAGTGA | 17 | 2542 |
| 501154 | 19360 | 19379 | GCTACTGGCATTGCTCCTCC | 75 | 2543 |
| 501155 | 19392 | 19411 | ACATGTGGCATTTGTTAGGT | 66 | 2544 |
| 501156 | 19421 | 19440 | GGAACATTAAATTTTAAAAC | 20 | 2545 |
| 501157 | 19775 | 19794 | TAGGATGAGGGTGATAATCC | 37 | 2546 |
| 501158 | 19804 | 19823 | CCTAACTCTAGCTTTGGTTT | 63 | 2547 |
| 501159 | 19809 | 19828 | AGTCACCTAACTCTAGCTTT | 20 | 2548 |
| 501160 | 19854 | 19873 | GCCCTGGGCCAGCTCTGCCC | 15 | 2549 |
| 501161 | 19867 | 19886 | TCTGAGAAAGAGGGCCCTGG | 26 | 2550 |
| 501162 | 19872 | 19891 | CTAAATCTGAGAAAGAGGGC | 0 | 2551 |
| 501163 | 19903 | 19922 | CTGAGGGCAGCAGTGTCTGA | 35 | 2552 |
| 501164 | 19908 | 19927 | CATGCCTGAGGGCAGCAGTG | 54 | 2553 |
| 501165 | 19913 | 19932 | TCTCACATGCCTGAGGGCAG | 74 | 2554 |
| 501166 | 19963 | 19982 | CAGGAAGGCCACACCTCGGG | 23 | 2555 |
| 501167 | 19968 | 19987 | GTGACCAGGAAGGCCACACC | 12 | 2556 |
| 501168 | 19973 | 19992 | TCAAAGTGACCAGGAAGGCC | 33 | 2557 |
| 501169 | 19978 | 19997 | TGATATCAAAGTGACCAGGA | 22 | 2558 |
| 501170 | 19983 | 20002 | ATATCTGATATCAAAGTGAC | 3 | 2559 |
| 501171 | 19988 | 20007 | GCCCAATATCTGATATCAAA | 74 | 2560 |
| 501172 | 20044 | 20063 | GACCCAGGGCCCAGCCCAGG | 18 | 2561 |
| 501173 | 20049 | 20068 | TCTCAGACCCAGGGCCCAGC | 55 | 2562 |
| 501174 | 20093 | 20112 | TGAGACTGGATTCCACCCCC | 24 | 2563 |
| 501175 | 20227 | 20246 | TACAATGCTACGCTGTTGAG | 36 | 2564 |
| 501176 | 20232 | 20251 | ATCTCTACAATGCTACGCTG | 73 | 2565 |
| 501177 | 20237 | 20256 | TCATCATCTCTACAATGCTA | 65 | 2566 |
| 501178 | 20242 | 20261 | GTCCCTCATCATCTCTACAA | 22 | 2567 |
| 501179 | 20247 | 20266 | TCCCAGTCCCTCATCATCTC | 49 | 2568 |
| 501180 | 20252 | 20271 | CAGGCTCCCAGTCCCTCATC | 16 | 2569 |
| 501181 | 20257 | 20276 | GTATTCAGGCTCCCAGTCCC | 7 | 2570 |
| 501182 | 20296 | 20315 | TGCTTGAGGTCAGGGTGTGG | 65 | 2571 |
| 501183 | 20301 | 20320 | TCACTTGCTTGAGGTCAGGG | 83 | 2572 |
| 501184 | 20306 | 20325 | CAAAATCACTTGCTTGAGGT | 72 | 2573 |
| 501185 | 20311 | 20330 | AGAGGCAAAATCACTTGCTT | 59 | 2574 |
| 501186 | 20397 | 20416 | CCACAGCACTCTCTGGGAAG | 30 | 2575 |
| 501187 | 20402 | 20421 | CCGTCCCACAGCACTCTCTG | 27 | 2576 |
| 501188 | 20407 | 20426 | CTTCACCGTCCCACAGCACT | 39 | 2577 |
| 501189 | 20442 | 20461 | GGAAAGCAATCCCCTTCTCC | 41 | 2578 |
| 501190 | 20447 | 20466 | CACCCGGAAAGCAATCCCCT | 18 | 2579 |
| 501191 | 20452 | 20471 | TTTACCACCCGGAAAGCAAT | 12 | 2580 |
| 501192 | 20457 | 20476 | GCTCTTTTACCACCCGGAAA | 55 | 2581 |
| 501193 | 20462 | 20481 | GAGCAGCTCTTTTACCACCC | 66 | 2582 |
| 501194 | 20541 | 20560 | GCAGCACTTGCTTTACACAC | 60 | 2583 |
| 501195 | 20546 | 20565 | CCCAGGCAGCACTTGCTTTA | 33 | 2584 |
| 501196 | 20551 | 20570 | CTGCTCCCAGGCAGCACTTG | 0 | 2585 |
| 501197 | 20639 | 20658 | ACAACCCTGCTACCTACAGA | 23 | 2586 |
| 501198 | 20644 | 20663 | GGAACACAACCCTGCTACCT | 37 | 2587 |
| 501199 | 20668 | 20687 | GTACAAGTTTCTCCACCTAT | 80 | 2588 |
| 501200 | 20673 | 20692 | CCTAGGTACAAGTTTCTCCA | 79 | 2589 |
| 501201 | 20714 | 20733 | GGACTGACCCCAGAGATGGG | 22 | 2590 |
| 501202 | 20719 | 20738 | ACTGAGGACTGACCCCAGAG | 0 | 2591 |
| 501203 | 20724 | 20743 | CCATCACTGAGGACTGACCC | 33 | 2592 |
| 501204 | 20729 | 20748 | CAGCCCCATCACTGAGGACT | 18 | 2593 |
| 501205 | 20771 | 20790 | GGATGCCCAAGTTAGACTGG | 24 | 2594 |
| 495670 | 20776 | 20795 | GGCCTGGATGCCCAAGTTAG | 69 | 1943 |
| 501206 | 20802 | 20821 | CCAGAGCAGCCTCAGAGGCA | 55 | 2595 |
| 501207 | 20807 | 20826 | CAAATCCAGAGCAGCCTCAG | 13 | 2596 |
| 501208 | 20812 | 20831 | ATAAGCAAATCCAGAGCAGC | 18 | 2597 |
| 501209 | 20817 | 20836 | AATCCATAAGCAAATCCAGA | 60 | 2598 |
| 501210 | 20822 | 20841 | GAGCAAATCCATAAGCAAAT | 70 | 2599 |
| 501211 | 20827 | 20846 | TAGCTGAGCAAATCCATAAG | 58 | 2600 |
| 501212 | 20832 | 20851 | CTGCATAGCTGAGCAAATCC | 79 | 2601 |
| 501213 | 20837 | 20856 | GTTTACTGCATAGCTGAGCA | 84 | 2602 |
| 501214 | 20842 | 20861 | TAGAGGTTTACTGCATAGCT | 75 | 2603 |
| 501215 | 20868 | 20887 | GATTCATCTGTGGTAAGAGG | 55 | 2604 |
| 501216 | 20873 | 20892 | TACCTGATTCATCTGTGGTA | 44 | 2605 |
| 501217 | 20878 | 20897 | CTTGGTACCTGATTCATCTG | 64 | 2606 |
| 501218 | 20884 | 20903 | CCAGGACTTGGTACCTGATT | 54 | 2607 |
| 501219 | 20889 | 20908 | GGGTGCCAGGACTTGGTACC | 26 | 2608 |
| 501220 | 20913 | 20932 | GCCATCCCACTGCCAGTGAC | 23 | 2609 |
| 501221 | 20937 | 20956 | ACAGCACCAATGTCACTTTA | 55 | 2610 |
| 501222 | 20950 | 20969 | TCTGCACACTCCCACAGCAC | 52 | 2611 |
| 501223 | 20955 | 20974 | CTCTCTCTGCACACTCCCAC | 59 | 2612 |
| 501224 | 20960 | 20979 | CTGCACTCTCTCTGCACACT | 76 | 2613 |
| 413433 | 32431 | 32450 | GCCTGGACAAGTCCTGCCCA | 77 | 425 |

TABLE 39
Inhibition of DGAT2 mRNA by 5-10-5 MOE
gapmers targeting SEQ ID NO: 2

| ISIS | SEQ ID NO: 2 | SEQ ID NO: 2 | | % | SEQ |
|---|---|---|---|---|---|
| NO | Start Site | Stop Site | Sequence | inhibition | ID NO |
| 501075 | 16484 | 16503 | GTCCTGGCCTCTACCCTGAA | 57 | 2614 |
| 501076 | 16510 | 16529 | GAAGGACTGGGATGCTAGGT | 65 | 2615 |
| 501077 | 16515 | 16534 | GGCATGAAGGACTGGGATGC | 49 | 2616 |
| 501078 | 16520 | 16539 | AGGGAGGCATGAAGGACTGG | 22 | 2617 |
| 501079 | 16525 | 16544 | GAAACAGGGAGGCATGAAGG | 21 | 2618 |
| 501080 | 16530 | 16549 | GTAGAGAAACAGGGAGGCAT | 34 | 2619 |
| 501081 | 16535 | 16554 | GAAAAGTAGAGAAACAGGGA | 0 | 2620 |
| 501082 | 16540 | 16559 | AGTTGGAAAAGTAGAGAAAC | 11 | 2621 |
| 501083 | 16546 | 16565 | GAGTCTAGTTGGAAAAGTAG | 1 | 2622 |
| 501084 | 16551 | 16570 | ACTGTGAGTCTAGTTGGAAA | 33 | 2623 |
| 501085 | 16556 | 16575 | CAGAGACTGTGAGTCTAGTT | 51 | 2624 |
| 501086 | 16561 | 16580 | CAGCACAGAGACTGTGAGTC | 59 | 2625 |
| 501087 | 16566 | 16585 | GACTGCAGCACAGAGACTGT | 29 | 2626 |
| 501088 | 16571 | 16590 | AGTCAGACTGCAGCACAGAG | 25 | 2627 |
| 501089 | 16576 | 16595 | AGTTTAGTCAGACTGCAGCA | 35 | 2628 |
| 501090 | 16673 | 16692 | GATGCCTTCCAGGAGGAAGG | 19 | 2629 |
| 501091 | 16678 | 16697 | TTAGGGATGCCTTCCAGGAG | 31 | 2630 |
| 501092 | 16683 | 16702 | TGTTCTTAGGGATGCCTTCC | 44 | 2631 |
| 501093 | 16808 | 16827 | AGGCTGAGTTCTGCTCCTGG | 72 | 2632 |
| 501094 | 16813 | 16832 | GCTAGAGGCTGAGTTCTGCT | 83 | 2633 |
| 501095 | 16818 | 16837 | CATCTGCTAGAGGCTGAGTT | 67 | 2634 |
| 501096 | 16823 | 16842 | TTGGGCATCTGCTAGAGGCT | 65 | 2635 |
| 501097 | 16828 | 16847 | GCTTCTTGGGCATCTGCTAG | 75 | 2636 |
| 501098 | 16833 | 16852 | CCTCTGCTTCTTGGGCATCT | 84 | 2637 |
| 501099 | 16896 | 16915 | TTTCTAAGTACCCTTTACAC | 34 | 2638 |
| 501100 | 16901 | 16920 | AGTGCTTTCTAAGTACCCTT | 86 | 2639 |
| 501101 | 16941 | 16960 | GGAGAGAGAAGGGTGGAACC | 26 | 2640 |
| 501102 | 16949 | 16968 | AGAGGAAGGGAGAGAGAAGG | 13 | 2641 |
| 501103 | 17007 | 17026 | GGGAAAGGTCTTCTCCAGCT | 89 | 2642 |
| 501104 | 17012 | 17031 | CAGGAGGGAAAGGTCTTCTC | 60 | 2643 |
| 501105 | 17017 | 17036 | GGAATCAGGAGGGAAAGGTC | 25 | 2644 |
| 501106 | 17038 | 17057 | GGGTCAAGCAGAGCTTTCTG | 66 | 2645 |
| 501107 | 17109 | 17128 | ATGAATAAACAGGGCCTAGA | 37 | 2646 |
| 501108 | 17114 | 17133 | CTGTGATGAATAAACAGGGC | 67 | 2647 |
| 501109 | 17138 | 17157 | TGAATGACTGAATGCTTGAG | 39 | 2648 |
| 501110 | 17143 | 17162 | TTTGCTGAATGACTGAATGC | 53 | 2649 |
| 501111 | 17207 | 17226 | TCTCATTCATCTGGGCCCTG | 72 | 2650 |
| 501112 | 17244 | 17263 | TGGGAAAAGGTATGTGTGTG | 16 | 2651 |
| 501113 | 17249 | 17268 | CATTATGGGAAAAGGTATGT | 8 | 2652 |
| 501114 | 17254 | 17273 | TTTCTCATTATGGGAAAAGG | 38 | 2653 |
| 501115 | 17259 | 17278 | AGCCCTTTCTCATTATGGGA | 47 | 2654 |
| 501116 | 17264 | 17283 | TACTCAGCCCTTTCTCATTA | 43 | 2655 |
| 501117 | 17269 | 17288 | CCCTGTACTCAGCCCTTTCT | 65 | 2656 |
| 501118 | 17274 | 17293 | CTCACCCCTGTACTCAGCCC | 73 | 2657 |
| 501119 | 17279 | 17298 | CCCATCTCACCCCTGTACTC | 66 | 2658 |
| 501120 | 17284 | 17303 | CCTGTCCCATCTCACCCCTG | 13 | 2659 |
| 501121 | 17289 | 17308 | CCCTGCCTGTCCCATCTCAC | 36 | 2660 |
| 501122 | 17328 | 17347 | AGTCTTCCTTCTCCTCCACC | 75 | 2661 |
| 501123 | 17333 | 17352 | TGGAAAGTCTTCCTTCTCCT | 72 | 2662 |
| 501124 | 17338 | 17357 | TTCTCTGGAAAGTCTTCCTT | 66 | 2663 |
| 501125 | 17420 | 17439 | TTGGTCAGTCTTTTAGCACA | 64 | 2664 |
| 501126 | 17425 | 17444 | CTAGTTTGGTCAGTCTTTTA | 68 | 2665 |
| 501127 | 17450 | 17469 | AGGTAGAGTTCTATTGCTTC | 81 | 2666 |
| 501128 | 17530 | 17549 | GTCTCCACTTGGTGCCTCAC | 72 | 2667 |
| 501129 | 17535 | 17554 | AAGCTGTCTCCACTTGGTGC | 61 | 2668 |
| 501130 | 17540 | 17559 | ACAGGAAGCTGTCTCCACTT | 69 | 2669 |
| 501131 | 17545 | 17564 | CTCACACAGGAAGCTGTCTC | 44 | 2670 |
| 501132 | 17614 | 17633 | AGCTGCCATCTCTGGAGGGT | 15 | 2671 |
| 501133 | 17619 | 17638 | GGCAAAGCTGCCATCTCTGG | 52 | 2672 |
| 501134 | 17624 | 17643 | GTCATGGCAAAGCTGCCATC | 7 | 2673 |
| 501135 | 17664 | 17683 | CCTTTCAGCGGGAGTCCACA | 44 | 2674 |
| 501136 | 17687 | 17706 | TTCCAGGCTCCTCCAGGCAG | 36 | 2675 |
| 501137 | 17692 | 17711 | CTCTCTTCCAGGCTCCTCCA | 44 | 2676 |
| 501138 | 17720 | 17739 | ATGCCACTTCATCAAGGCTG | 33 | 2677 |
| 501139 | 17725 | 17744 | AAGAGATGCCACTTCATCAA | 36 | 2678 |
| 501140 | 17730 | 17749 | TGCCAAAGAGATGCCACTTC | 63 | 2679 |
| 501141 | 17735 | 17754 | CCAAGTGCCAAAGAGATGCC | 39 | 2680 |
| 501142 | 17740 | 17759 | TCAGGCCAAGTGCCAAAGAG | 30 | 2681 |
| 501143 | 17745 | 17764 | GGAAGTCAGGCCAAGTGCCA | 38 | 2682 |
| 501144 | 17750 | 17769 | GTCTAGGAAGTCAGGCCAAG | 46 | 2683 |
| 501145 | 17755 | 17774 | GGGAGGTCTAGGAAGTCAGG | 19 | 2684 |
| 501146 | 17760 | 17779 | CCCCAGGGAGGTCTAGGAAG | 32 | 2685 |
| 501147 | 17765 | 17784 | TCCAGCCCCAGGGAGGTCTA | 30 | 2686 |
| 501148 | 17770 | 17789 | GCTCTTCCAGCCCCAGGGAG | 36 | 2687 |
| 501149 | 17804 | 17823 | AGAGTGAGGGTCAGTACATA | 15 | 2688 |
| 501150 | 17809 | 17828 | GTAGCAGAGTGAGGGTCAGT | 28 | 2689 |
| 501151 | 17933 | 17952 | TAGGTGAGTGAGAAAGTCAC | 16 | 2690 |
| 413433 | 32431 | 32450 | GCCTGGACAAGTCCTGCCCA | 78 | 425 |

TABLE 40
Inhibition of DGAT2 mRNA by 5-10-5 MOE
gapmers targeting SEQ ID NO: 2

| ISIS | SEQ ID NO: 2 | SEQ ID NO: 2 | | % | SEQ |
|---|---|---|---|---|---|
| NO | Start Site | Stop Site | Sequence | inhibition | ID NO |
| 500994 | 15257 | 15276 | CATCTGCACCATAATCTGCA | 72 | 2691 |
| 500995 | 15292 | 15311 | TTTACCCAAAAGGTTCACAG | 64 | 2692 |
| 500996 | 15297 | 15316 | ATTGATTTACCCAAAAGGTT | 32 | 2693 |
| 500997 | 15318 | 15337 | GAGTTTGTGTTTCCCATTTC | 69 | 2694 |
| 500998 | 15323 | 15342 | AAAAGGAGTTTGTGTTTCCC | 81 | 2695 |
| 500999 | 15328 | 15347 | ATAAGAAAAGGAGTTTGTGT | 30 | 2696 |
| 501000 | 15333 | 15352 | CTCTAATAAGAAAAGGAGTT | 33 | 2697 |
| 501001 | 15338 | 15357 | TTCTGCTCTAATAAGAAAAG | 12 | 2698 |
| 501002 | 15343 | 15362 | GCTAATTCTGCTCTAATAAG | 28 | 2699 |
| 501003 | 15348 | 15367 | GAATGGCTAATTCTGCTCTA | 48 | 2700 |
| 501004 | 15353 | 15372 | GCTTAGAATGGCTAATTCTG | 69 | 2701 |
| 501005 | 15358 | 15377 | GCAGGGCTTAGAATGGCTAA | 59 | 2702 |
| 501006 | 15363 | 15382 | CAGAGGCAGGGCTTAGAATG | 56 | 2703 |
| 501007 | 15368 | 15387 | GGAAGCAGAGGCAGGGCTTA | 68 | 2704 |
| 501008 | 15373 | 15392 | ACATGGGAAGCAGAGGCAGG | 66 | 2705 |
| 501009 | 15378 | 15397 | AGGTCACATGGGAAGCAGAG | 57 | 2706 |
| 501010 | 15431 | 15450 | TCCTCACTGTGCAGATGAGA | 30 | 2707 |
| 501011 | 15436 | 15455 | AGTCCTCCTCACTGTGCAGA | 48 | 2708 |
| 501012 | 15441 | 15460 | CAACCAGTCCTCCTCACTGT | 33 | 2709 |
| 501013 | 15446 | 15465 | CATCTCAACCAGTCCTCCTC | 52 | 2710 |
| 501014 | 15504 | 15523 | TTAGGGACAAGAATGGAATC | 23 | 2711 |
| 501015 | 15509 | 15528 | AGCAGTTAGGGACAAGAATG | 10 | 2712 |
| 501016 | 15514 | 15533 | CCCACAGCAGTTAGGGACAA | 63 | 2713 |
| 501017 | 15568 | 15587 | TTTTCACAAGGAGAAGCTGA | 47 | 2714 |
| 501018 | 15573 | 15592 | CACCATTTTCACAAGGAGAA | 76 | 2715 |
| 501019 | 15578 | 15597 | GAGTGCACCATTTTCACAAG | 71 | 2716 |
| 501020 | 15646 | 15665 | ATCACAATATATGGGCAAGC | 82 | 2717 |
| 501021 | 15651 | 15670 | TCCCCATCACAATATATGGG | 39 | 2718 |
| 501022 | 15671 | 15690 | CAAGGAATCTCCAAAATACG | 37 | 2719 |
| 501023 | 15703 | 15722 | ATGGCAACACTACTAGCTTG | 27 | 2720 |
| 501024 | 15708 | 15727 | CTGCCATGGCAACACTACTA | 56 | 2721 |
| 501025 | 15729 | 15748 | TAGCTACTGCAGTGGAAGGG | 71 | 2722 |
| 501026 | 15734 | 15753 | AAAAGTAGCTACTGCAGTGG | 69 | 2723 |
| 501027 | 15739 | 15758 | ATTCAAAAAGTAGCTACTGC | 59 | 2724 |
| 501028 | 15744 | 15763 | AGCACATTCAAAAAGTAGCT | 59 | 2725 |
| 501029 | 15804 | 15823 | CTGGACATGATTGCTGAGGA | 63 | 2726 |
| 501030 | 15809 | 15828 | GGACCCTGGACATGATTGCT | 74 | 2727 |
| 501031 | 15814 | 15833 | ATCCAGGACCCTGGACATGA | 69 | 2728 |
| 501032 | 15839 | 15858 | TTCCTGATACCGAACATGGA | 22 | 2729 |
| 501033 | 15876 | 15895 | GGTAAGGCCAAGGAAGTGAG | 78 | 2730 |
| 501034 | 15881 | 15900 | CAAGAGGTAAGGCCAAGGAA | 80 | 2731 |
| 501035 | 15933 | 15952 | ACCTGGGTTTTTGTGTATTC | 82 | 2732 |
| 501036 | 15938 | 15957 | CATACACCTGGGTTTTTGTG | 57 | 2733 |
| 501037 | 15943 | 15962 | TACTCCATACACCTGGGTTT | 69 | 2734 |
| 501038 | 15991 | 16010 | TTATCCACAGAAGATCTCCC | 75 | 2735 |
| 501039 | 16046 | 16065 | CTGAGTGCTGCTAACTTGGG | 70 | 2736 |
| 501040 | 16051 | 16070 | GAAATCTGAGTGCTGCTAAC | 78 | 2737 |
| 501041 | 16082 | 16101 | CACTAAATTAGGAAGCTGGG | 79 | 2738 |
| 501043 | 16105 | 16124 | CCCTCTCTAGGTTTCCCCAT | 63 | 2739 |
| 501045 | 16110 | 16129 | TCCTCCCCTCTCTAGGTTTC | 34 | 2740 |
| 501047 | 16115 | 16134 | CCTCTTCCTCCCCTCTCTAG | 24 | 2741 |
| 501049 | 16120 | 16139 | CTAAGCCTCTTCCTCCCCTC | 33 | 2742 |
| 501050 | 16171 | 16190 | GCCTGCTGCAGGGAGCCAGG | 4 | 2743 |
| 501051 | 16208 | 16227 | GGCCATCAGGACCCTGCAGG | 30 | 2744 |
| 501052 | 16213 | 16232 | AAGTGGGCCATCAGGACCCT | 5 | 2745 |
| 501053 | 16227 | 16246 | GTGTGCCAGGTGGGAAGTGG | 0 | 2746 |
| 501054 | 16232 | 16251 | GCTAGGTGTGCCAGGTGGGA | 38 | 2747 |
| 501055 | 16237 | 16256 | GCTATGCTAGGTGTGCCAGG | 62 | 2748 |
| 501056 | 16242 | 16261 | ACACAGCTATGCTAGGTGTG | 22 | 2749 |
| 501057 | 16247 | 16266 | CCAGCACACAGCTATGCTAG | 25 | 2750 |
| 501058 | 16252 | 16271 | GAGAGCCAGCACACAGCTAT | 44 | 2751 |
| 501059 | 16257 | 16276 | TACTGGAGAGCCAGCACACA | 57 | 2752 |
| 501060 | 16262 | 16281 | CAAACTACTGGAGAGCCAGC | 59 | 2753 |
| 501061 | 16288 | 16307 | TGGGACATCTGGCCCAAAGG | 67 | 2754 |
| 501062 | 16293 | 16312 | CCCACTGGGACATCTGGCCC | 77 | 2755 |
| 501063 | 16305 | 16324 | CTTAAAGCAGGGCCCACTGG | 49 | 2756 |
| 501064 | 16310 | 16329 | GTATCCTTAAAGCAGGGCCC | 80 | 2757 |
| 501065 | 16364 | 16383 | TTCTTTTCTGAAAAGATTAA | 16 | 2758 |
| 501066 | 16369 | 16388 | GTGAGTTCTTTTCTGAAAAG | 48 | 2759 |
| 501067 | 16428 | 16447 | ACTGGTGCCTAAGAGCCCTA | 76 | 2760 |
| 501068 | 16433 | 16452 | CCTCCACTGGTGCCTAAGAG | 66 | 2761 |
| 501069 | 16438 | 16457 | CACTCCCTCCACTGGTGCCT | 71 | 2762 |
| 501070 | 16459 | 16478 | AGAAGACAGCCAGTCAGAGC | 67 | 2763 |
| 501071 | 16464 | 16483 | GGCAGAGAAGACAGCCAGTC | 53 | 2764 |
| 501072 | 16469 | 16488 | CTGAAGGCAGAGAAGACAGC | 11 | 2765 |
| 501073 | 16474 | 16493 | CTACCCTGAAGGCAGAGAAG | 0 | 2766 |
| 501074 | 16479 | 16498 | GGCCTCTACCCTGAAGGCAG | 1 | 2767 |
| 413433 | 32431 | 32450 | GCCTGGACAAGTCCTGCCCA | 79 | 425 |

TABLE 41
Inhibition of DGAT2 mRNA by 5-10-5 MOE
gapmers targeting SEQ ID NO: 2

| ISIS | SEQ ID NO: 2 | SEQ ID NO: 2 | | % | SEQ |
|---|---|---|---|---|---|
| NO | Start Site | Stop Site | Sequence | inhibition | ID NO |
| 500917 | 12407 | 12426 | TGTCAGAAAGGACTCCTCTG | 37 | 2768 |
| 500918 | 12412 | 12431 | ACAGCTGTCAGAAAGGACTC | 47 | 2769 |
| 500919 | 12417 | 12436 | CCTCAACAGCTGTCAGAAAG | 22 | 2770 |
| 500920 | 12439 | 12458 | ACCCACCCCAGCCTGTTGCA | 56 | 2771 |
| 500921 | 12474 | 12493 | CAAGCAGATCCACAGTGATG | 16 | 2772 |
| 500922 | 12479 | 12498 | AGTTTCAAGCAGATCCACAG | 37 | 2773 |
| 500923 | 12500 | 12519 | CCCCCAACAATCTAGCCACT | 41 | 2774 |
| 500924 | 12505 | 12524 | AGTTACCCCCAACAATCTAG | 16 | 2775 |
| 500925 | 12510 | 12529 | TTCCCAGTTACCCCCAACAA | 16 | 2776 |
| 500926 | 12515 | 12534 | CTCAGTTCCCAGTTACCCCC | 44 | 2777 |
| 500927 | 12520 | 12539 | CAACCCTCAGTTCCCAGTTA | 26 | 2778 |
| 500928 | 12549 | 12568 | TCTGACTTAGGACTAGGTTA | 70 | 2779 |
| 500929 | 12554 | 12573 | CTCATTCTGACTTAGGACTA | 64 | 2780 |
| 500930 | 12559 | 12578 | ATGTTCTCATTCTGACTTAG | 44 | 2781 |
| 500931 | 12564 | 12583 | GAGTAATGTTCTCATTCTGA | 44 | 2782 |
| 500932 | 12569 | 12588 | CATGAGAGTAATGTTCTCAT | 44 | 2783 |
| 500933 | 12618 | 12637 | GGAAGTGATGTAGGTGAGGG | 23 | 2784 |
| 500934 | 12671 | 12690 | AGCCTAGATGAGCCCTTGGT | 65 | 2785 |
| 500935 | 12676 | 12695 | TTCTCAGCCTAGATGAGCCC | 69 | 2786 |
| 500936 | 12681 | 12700 | CTCCTTTCTCAGCCTAGATG | 52 | 2787 |
| 500937 | 12686 | 12705 | TGGCCCTCCTTTCTCAGCCT | 54 | 2788 |
| 500938 | 12691 | 12710 | ACTCTTGGCCCTCCTTTCTC | 26 | 2789 |
| 500939 | 12696 | 12715 | ACATTACTCTTGGCCCTCCT | 59 | 2790 |
| 500940 | 12779 | 12798 | TTGCTGTTGAATTTGAGGGC | 53 | 2791 |
| 500941 | 12784 | 12803 | AGTACTTGCTGTTGAATTTG | 45 | 2792 |
| 500942 | 12806 | 12825 | CAGCACTAATTTTTACAACT | 78 | 2793 |
| 500943 | 12834 | 12853 | ATCTGTAACATGAGGGTTGG | 36 | 2794 |
| 500944 | 12839 | 12858 | ATCCCATCTGTAACATGAGG | 69 | 2795 |
| 500945 | 12844 | 12863 | CAGTGATCCCATCTGTAACA | 67 | 2796 |
| 500946 | 12890 | 12909 | GCCTGGCTTTGATAACCCTG | 63 | 2797 |
| 500947 | 12895 | 12914 | TTCTAGCCTGGCTTTGATAA | 20 | 2798 |
| 500948 | 12917 | 12936 | CAGACTGGGAGATGGATCTG | 31 | 2799 |
| 500949 | 12922 | 12941 | GGCCACAGACTGGGAGATGG | 47 | 2800 |
| 500950 | 12927 | 12946 | AGTCAGGCCACAGACTGGGA | 72 | 2801 |
| 500951 | 12932 | 12951 | TAAGGAGTCAGGCCACAGAC | 47 | 2802 |
| 500952 | 12937 | 12956 | TGGCTTAAGGAGTCAGGCCA | 43 | 2803 |
| 500953 | 12942 | 12961 | TCTCTTGGCTTAAGGAGTCA | 71 | 2804 |
| 500954 | 12977 | 12996 | GCCCTGCACTCAGCCCTTCA | 19 | 2805 |
| 500955 | 12982 | 13001 | ACAGAGCCCTGCACTCAGCC | 54 | 2806 |
| 500956 | 13026 | 13045 | GACAACCTTCACTCATTCAG | 35 | 2807 |
| 500957 | 13098 | 13117 | ATCCACTAGGGCAGGCTTGG | 69 | 2808 |
| 500958 | 13202 | 13221 | GGCCAGGAGGAAGAGTTTGG | 39 | 2809 |
| 500959 | 13207 | 13226 | TCATAGGCCAGGAGGAAGAG | 20 | 2810 |
| 500960 | 13212 | 13231 | TTACTTCATAGGCCAGGAGG | 63 | 2811 |
| 500961 | 13239 | 13258 | TGGCAGTGGAGGCTGTTCAC | 63 | 2812 |
| 500962 | 13306 | 13325 | GCAGGAACAGGAAGACCACC | 0 | 2813 |
| 500963 | 13311 | 13330 | ATGCTGCAGGAACAGGAAGA | 51 | 2814 |
| 500964 | 13316 | 13335 | GAGTAATGCTGCAGGAACAG | 35 | 2815 |
| 500965 | 13321 | 13340 | ATTGGGAGTAATGCTGCAGG | 55 | 2816 |
| 500966 | 13441 | 13460 | TGGCTCTCTAGATAGGGTGG | 75 | 2817 |
| 500967 | 13485 | 13504 | TAAAAGAAGATGTGGTGATT | 0 | 2818 |
| 500968 | 13490 | 13509 | AAAAATAAAAGAAGATGTGG | 0 | 2819 |
| 500969 | 13495 | 13514 | GCTATAAAAATAAAAGAAGA | 0 | 2820 |
| 500970 | 13500 | 13519 | TAAAGGCTATAAAAATAAAA | 0 | 2821 |
| 500971 | 13542 | 13561 | ATTGCTTAAACAGATAAGCA | 6 | 2822 |
| 500972 | 13547 | 13566 | AGACAATTGCTTAAACAGAT | 32 | 2823 |
| 500973 | 13916 | 13935 | GTTCCTGTTTCCAAGGGACT | 59 | 2824 |
| 500974 | 13921 | 13940 | ACAAGGTTCCTGTTTCCAAG | 69 | 2825 |
| 500975 | 13926 | 13945 | GACAGACAAGGTTCCTGTTT | 72 | 2826 |
| 500976 | 13931 | 13950 | AGAAAGACAGACAAGGTTCC | 51 | 2827 |
| 500977 | 13936 | 13955 | CACTGAGAAAGACAGACAAG | 0 | 2828 |
| 500978 | 13941 | 13960 | CACAGCACTGAGAAAGACAG | 36 | 2829 |
| 500979 | 13962 | 13981 | GCCAGGCACTGTGCTAGATG | 63 | 2830 |
| 500980 | 13967 | 13986 | CCAGTGCCAGGCACTGTGCT | 37 | 2831 |
| 500981 | 13972 | 13991 | TATTACCAGTGCCAGGCACT | 13 | 2832 |
| 500982 | 13977 | 13996 | GTACCTATTACCAGTGCCAG | 64 | 2833 |
| 500983 | 13982 | 14001 | ACTAAGTACCTATTACCAGT | 7 | 2834 |
| 500984 | 14054 | 14073 | AGCTAAAAGCAGGGCTTCCT | 0 | 2835 |
| 500985 | 14177 | 14196 | GCTCCTTGCCAGACTGTGGG | 60 | 2836 |
| 500986 | 14182 | 14201 | AGCCAGCTCCTTGCCAGACT | 75 | 2837 |
| 500987 | 14187 | 14206 | CTTGGAGCCAGCTCCTTGCC | 54 | 2838 |
| 500988 | 14192 | 14211 | TCAGCCTTGGAGCCAGCTCC | 35 | 2839 |
| 500989 | 14197 | 14216 | GCCACTCAGCCTTGGAGCCA | 76 | 2840 |
| 500990 | 14239 | 14258 | GGAAGCAGTAAGGGTGACCA | 73 | 2841 |
| 500991 | 14246 | 14265 | AGCCCTGGGAAGCAGTAAGG | 11 | 2842 |
| 500992 | 14251 | 14270 | TAATAAGCCCTGGGAAGCAG | 0 | 2843 |
| 500993 | 14327 | 14346 | ATCCCCAGAGAGGAAGTGAA | 0 | 2844 |
| 413433 | 32431 | 32450 | GCCTGGACAAGTCCTGCCCA | 80 | 425 |

TABLE 42
Inhibition of DGAT2 mRNA by 5-10-5 MOE
gapmers targeting SEQ ID NO: 2

| ISIS | SEQ ID NO: 2 | SEQ ID NO: 2 | | % | SEQ |
|---|---|---|---|---|---|
| NO | Start Site | Stop Site | Sequence | inhibition | ID NO |
| 500840 | 11204 | 11223 | ATAACCACAGCGATAATCAC | 45 | 2845 |
| 500841 | 11209 | 11228 | GGCAGATAACCACAGCGATA | 79 | 2846 |
| 500842 | 11228 | 11247 | CAGCACCCACACCAAGAGGG | 38 | 2847 |
| 500843 | 11318 | 11337 | TCAGAGGCTACTGGCTGGAT | 69 | 2848 |
| 500844 | 11323 | 11342 | GGCTGTCAGAGGCTACTGGC | 75 | 2849 |
| 500845 | 11346 | 11365 | AAAAGGACTCAAGTGAGAGA | 24 | 2850 |
| 500846 | 11351 | 11370 | AACAGAAAAGGACTCAAGTG | 4 | 2851 |
| 500847 | 11356 | 11375 | CAGGGAACAGAAAAGGACTC | 30 | 2852 |
| 500848 | 11361 | 11380 | GGACACAGGGAACAGAAAAG | 2 | 2853 |
| 500849 | 11366 | 11385 | TCAAAGGACACAGGGAACAG | 24 | 2854 |
| 500850 | 11371 | 11390 | GGACATCAAAGGACACAGGG | 3 | 2855 |
| 500851 | 11376 | 11395 | CCTAAGGACATCAAAGGACA | 3 | 2856 |
| 500852 | 11413 | 11432 | GCATGAACAAGGGCAAGTCC | 74 | 2857 |
| 500853 | 11457 | 11476 | AGAACATCCCTATCCCACTG | 37 | 2858 |
| 500854 | 11462 | 11481 | CACAGAGAACATCCCTATCC | 59 | 2859 |
| 500855 | 11509 | 11528 | CCTGTGGATGGCAGAGCCGA | 32 | 2860 |
| 500856 | 11514 | 11533 | CCCAGCCTGTGGATGGCAGA | 21 | 2861 |
| 500857 | 11519 | 11538 | CAGCTCCCAGCCTGTGGATG | 0 | 2862 |
| 500858 | 11553 | 11572 | CATGACAGCCAGGGTCACTG | 57 | 2863 |
| 500859 | 11559 | 11578 | CAAAAACATGACAGCCAGGG | 80 | 2864 |
| 500860 | 11564 | 11583 | TAAGTCAAAAACATGACAGC | 24 | 2865 |
| 500861 | 11569 | 11588 | AACTCTAAGTCAAAAACATG | 0 | 2866 |
| 500862 | 11574 | 11593 | GAACAAACTCTAAGTCAAAA | 5 | 2867 |
| 500863 | 11579 | 11598 | CTAAGGAACAAACTCTAAGT | 19 | 2868 |
| 500864 | 11584 | 11603 | TTCTCCTAAGGAACAAACTC | 31 | 2869 |
| 500865 | 11589 | 11608 | ACAAGTTCTCCTAAGGAACA | 28 | 2870 |
| 500866 | 11594 | 11613 | AGAGTACAAGTTCTCCTAAG | 66 | 2871 |
| 500867 | 11599 | 11618 | TCGCTAGAGTACAAGTTCTC | 81 | 2872 |
| 500868 | 11635 | 11654 | TCCTGACATGATATTAAGTG | 50 | 2873 |
| 500869 | 11640 | 11659 | AATGTTCCTGACATGATATT | 5 | 2874 |
| 500870 | 11707 | 11726 | ATGATGTAAATCCTTGCACC | 68 | 2875 |
| 500871 | 11712 | 11731 | ATTCCATGATGTAAATCCTT | 63 | 2876 |
| 500872 | 11717 | 11736 | CCTACATTCCATGATGTAAA | 45 | 2877 |
| 500873 | 11722 | 11741 | CCCTTCCTACATTCCATGAT | 56 | 2878 |
| 500874 | 11727 | 11746 | ACCAGCCCTTCCTACATTCC | 54 | 2879 |
| 500875 | 11732 | 11751 | TTCATACCAGCCCTTCCTAC | 22 | 2880 |
| 500876 | 11755 | 11774 | AAGCTGAACTGACTGGTTTG | 41 | 2881 |
| 500877 | 11760 | 11779 | CCAGAAAGCTGAACTGACTG | 0 | 2882 |
| 500878 | 11765 | 11784 | AGATCCCAGAAAGCTGAACT | 29 | 2883 |
| 500879 | 11770 | 11789 | AAAGTAGATCCCAGAAAGCT | 15 | 2884 |
| 500880 | 11775 | 11794 | TCACCAAAGTAGATCCCAGA | 58 | 2885 |
| 500881 | 11780 | 11799 | ATCTTTCACCAAAGTAGATC | 33 | 2886 |
| 500882 | 11785 | 11804 | ACCCAATCTTTCACCAAAGT | 18 | 2887 |
| 500883 | 11790 | 11809 | ACTCCACCCAATCTTTCACC | 49 | 2888 |
| 500884 | 11795 | 11814 | CCCCTACTCCACCCAATCTT | 14 | 2889 |
| 500885 | 11800 | 11819 | GCCCTCCCCTACTCCACCCA | 32 | 2890 |
| 500886 | 11805 | 11824 | TCAGTGCCCTCCCCTACTCC | 26 | 2891 |
| 500887 | 11827 | 11846 | TGCCCAGATAACAAAATGTG | 29 | 2892 |
| 500888 | 11832 | 11851 | GGAGATGCCCAGATAACAAA | 56 | 2893 |
| 500889 | 11857 | 11876 | CAAGGATCTAGAAGGCAGGT | 59 | 2894 |
| 500890 | 11862 | 11881 | AGGACCAAGGATCTAGAAGG | 28 | 2895 |
| 500891 | 11867 | 11886 | CTTCAAGGACCAAGGATCTA | 30 | 2896 |
| 500892 | 11872 | 11891 | AGTATCTTCAAGGACCAAGG | 72 | 2897 |
| 500893 | 11893 | 11912 | AGGCAAACTAGGCCACTGGG | 20 | 2898 |
| 500894 | 11898 | 11917 | CACAGAGGCAAACTAGGCCA | 4 | 2899 |
| 500895 | 11920 | 11939 | CTCACAACAGTGGGACCTTA | 69 | 2900 |
| 500896 | 11925 | 11944 | ACCAGCTCACAACAGTGGGA | 43 | 2901 |
| 500897 | 11930 | 11949 | TGTTCACCAGCTCACAACAG | 8 | 2902 |
| 500898 | 11964 | 11983 | CATGGTCTCTACTTGAATAC | 14 | 2903 |
| 500899 | 11969 | 11988 | GAATCCATGGTCTCTACTTG | 18 | 2904 |
| 500900 | 11974 | 11993 | TCACAGAATCCATGGTCTCT | 42 | 2905 |
| 500901 | 11979 | 11998 | TCCCTTCACAGAATCCATGG | 36 | 2906 |
| 500902 | 11984 | 12003 | GGACTTCCCTTCACAGAATC | 23 | 2907 |
| 500903 | 11989 | 12008 | TCACAGGACTTCCCTTCACA | 47 | 2908 |
| 500904 | 12070 | 12089 | ACCTACCCATACTCCCACAG | 31 | 2909 |
| 500905 | 12075 | 12094 | CACCCACCTACCCATACTCC | 15 | 2910 |
| 500906 | 12080 | 12099 | GCATGCACCCACCTACCCAT | 41 | 2911 |
| 500907 | 12085 | 12104 | CCCCAGCATGCACCCACCTA | 14 | 2912 |
| 500908 | 12090 | 12109 | GCTTCCCCCAGCATGCACCC | 36 | 2913 |
| 500909 | 12138 | 12157 | GGCACAGGACAGCCCTCCAA | 54 | 2914 |
| 500910 | 12169 | 12188 | TGTCCTGATGAACTCTGCAA | 54 | 2915 |
| 500911 | 12242 | 12261 | TGTCAGAGGGCTCTTCTGAA | 0 | 2916 |
| 500912 | 12247 | 12266 | GCAGGTGTCAGAGGGCTCTT | 60 | 2917 |
| 500913 | 12285 | 12304 | TCTCATGCTAGGTCCTGTGC | 80 | 2918 |
| 500914 | 12392 | 12411 | CTCTGCTACATCAAAACTTG | 25 | 2919 |
| 500915 | 12397 | 12416 | GACTCCTCTGCTACATCAAA | 38 | 2920 |
| 500916 | 12402 | 12421 | GAAAGGACTCCTCTGCTACA | 23 | 2921 |
| 413433 | 32431 | 32450 | GCCTGGACAAGTCCTGCCCA | 75 | 425 |

TABLE 43
Inhibition of DGAT2 mRNA by 5-10-5 MOE
gapmers targeting SEQ ID NO: 2

| ISIS | SEQ ID NO: 2 | SEQ ID NO: 2 | | % | SEQ |
|---|---|---|---|---|---|
| NO | Start Site | Stop Site | Sequence | inhibition | ID NO |
| 501824 | 27442 | 27461 | TTGGGTCTGATCAATTATTA | 14 | 2922 |
| 501825 | 27447 | 27466 | TGTGGTTGGGTCTGATCAAT | 50 | 2923 |
| 501826 | 27458 | 27477 | GGTTTCTGGGCTGTGGTTGG | 20 | 2924 |
| 501827 | 27469 | 27488 | GATGCTGGGCCGGTTTCTGG | 40 | 2925 |
| 501828 | 27551 | 27570 | CAGGAGATCTGCCTGTCCAA | 48 | 2926 |
| 501829 | 27556 | 27575 | TAGCTCAGGAGATCTGCCTG | 32 | 2927 |
| 501830 | 27561 | 27580 | AGCAGTAGCTCAGGAGATCT | 50 | 2928 |
| 501831 | 27566 | 27585 | TAATTAGCAGTAGCTCAGGA | 65 | 2929 |
| 501832 | 27613 | 27632 | AGGTTTGAGAGGCAGAGGGA | 6 | 2930 |
| 501833 | 27618 | 27637 | CCAGCAGGTTTGAGAGGCAG | 29 | 2931 |
| 501834 | 27623 | 27642 | TTCTGCCAGCAGGTTTGAGA | 40 | 2932 |
| 501835 | 27628 | 27647 | TGAGCTTCTGCCAGCAGGTT | 64 | 2933 |
| 501836 | 27633 | 27652 | CCAGGTGAGCTTCTGCCAGC | 43 | 2934 |
| 501837 | 27638 | 27657 | GCTTGCCAGGTGAGCTTCTG | 61 | 2935 |
| 501838 | 27643 | 27662 | TCTTTGCTTGCCAGGTGAGC | 67 | 2936 |
| 501839 | 27673 | 27692 | TCCAGGGAGAGACCAACAGG | 7 | 2937 |
| 501840 | 27678 | 27697 | TCTGGTCCAGGGAGAGACCA | 0 | 2938 |
| 501841 | 27683 | 27702 | AAATCTCTGGTCCAGGGAGA | 26 | 2939 |
| 501842 | 27688 | 27707 | GTGAAAAATCTCTGGTCCAG | 12 | 2940 |
| 501843 | 27693 | 27712 | AAGTGGTGAAAAATCTCTGG | 5 | 2941 |
| 501844 | 27698 | 27717 | GCACAAAGTGGTGAAAAATC | 41 | 2942 |
| 501845 | 27703 | 27722 | CCATGGCACAAAGTGGTGAA | 41 | 2943 |
| 501846 | 27708 | 27727 | GGGTTCCATGGCACAAAGTG | 1 | 2944 |
| 501847 | 27761 | 27780 | ATTAAATACTCTAAAACACT | 0 | 2945 |
| 501848 | 27766 | 27785 | CTTGTATTAAATACTCTAAA | 5 | 2946 |
| 501849 | 27771 | 27790 | TGCACCTTGTATTAAATACT | 77 | 2947 |
| 501850 | 27776 | 27795 | TCCAATGCACCTTGTATTAA | 79 | 2948 |
| 501851 | 27781 | 27800 | TGAAATCCAATGCACCTTGT | 69 | 2949 |
| 501852 | 27786 | 27805 | TCCTTTGAAATCCAATGCAC | 76 | 2950 |
| 501853 | 27791 | 27810 | TAGTTTCCTTTGAAATCCAA | 64 | 2951 |
| 501854 | 27849 | 27868 | TGTTACTACATGTCTAATCA | 32 | 2952 |
| 501855 | 27854 | 27873 | GCACCTGTTACTACATGTCT | 87 | 2953 |
| 501856 | 27859 | 27878 | AAAAGGCACCTGTTACTACA | 57 | 2954 |
| 501857 | 27864 | 27883 | TAATAAAAAGGCACCTGTTA | 32 | 2955 |
| 501858 | 27992 | 28011 | AAATAACAAAGGTATTTTCA | 1 | 2956 |
| 501859 | 27997 | 28016 | CAAATAAATAACAAAGGTAT | 14 | 2957 |
| 501860 | 28002 | 28021 | TGACACAAATAAATAACAAA | 18 | 2958 |
| 501861 | 28026 | 28045 | TCACAGAATTATCAGCAGTA | 92 | 2959 |
| 501862 | 28031 | 28050 | ATAAATCACAGAATTATCAG | 0 | 2960 |
| 501863 | 28054 | 28073 | CATTTCCTTCACTTACCAAT | 41 | 2961 |
| 501864 | 28078 | 28097 | CACTTATCTCTTATGGAAAT | 47 | 2962 |
| 501865 | 28083 | 28102 | ATTTTCACTTATCTCTTATG | 35 | 2963 |
| 501866 | 28088 | 28107 | TCTAAATTTTCACTTATCTC | 48 | 2964 |
| 501867 | 28093 | 28112 | TGACATCTAAATTTTCACTT | 63 | 2965 |
| 501868 | 28098 | 28117 | ACAAATGACATCTAAATTTT | 0 | 2966 |
| 501869 | 28103 | 28122 | GGGAAACAAATGACATCTAA | 58 | 2967 |
| 501870 | 28127 | 28146 | ACACAATATCCATGGACTTG | 59 | 2968 |
| 501871 | 28132 | 28151 | CTGACACACAATATCCATGG | 75 | 2969 |
| 501872 | 28185 | 28204 | ATTTCCTTACAGGGTATTGG | 53 | 2970 |
| 501873 | 28210 | 28229 | GGCCAAGCCCCATTCCTAAG | 7 | 2971 |
| 501874 | 28215 | 28234 | TTGCTGGCCAAGCCCCATTC | 0 | 2972 |
| 501875 | 28220 | 28239 | GCCACTTGCTGGCCAAGCCC | 22 | 2973 |
| 501876 | 28269 | 28288 | GGTGAAGAGCATGGACTCTG | 41 | 2974 |
| 501877 | 28293 | 28312 | GCAGGGAAGGCAGCAGTGTG | 39 | 2975 |
| 501878 | 28298 | 28317 | CAATGGCAGGGAAGGCAGCA | 55 | 2976 |
| 501879 | 28358 | 28377 | ACTTGTGATACAAAATTCTG | 41 | 2977 |
| 501880 | 28363 | 28382 | AAGACACTTGTGATACAAAA | 66 | 2978 |
| 501881 | 28454 | 28473 | AAGCTTAGAAGGCCCTGCTT | 44 | 2979 |
| 501882 | 28459 | 28478 | ATGAGAAGCTTAGAAGGCCC | 41 | 2980 |
| 501883 | 28464 | 28483 | AGCTCATGAGAAGCTTAGAA | 74 | 2981 |
| 501884 | 28469 | 28488 | TGCTGAGCTCATGAGAAGCT | 82 | 2982 |
| 501885 | 28474 | 28493 | ACTGTTGCTGAGCTCATGAG | 37 | 2983 |
| 501886 | 28479 | 28498 | AAACCACTGTTGCTGAGCTC | 78 | 2984 |
| 501887 | 28484 | 28503 | AGTAAAAACCACTGTTGCTG | 60 | 2985 |
| 501888 | 28489 | 28508 | GCTGCAGTAAAAACCACTGT | 66 | 2986 |
| 501889 | 28515 | 28534 | CTGGTTCCATGCTCTTAGGT | 63 | 2987 |
| 501890 | 28520 | 28539 | AGGCTCTGGTTCCATGCTCT | 71 | 2988 |
| 501891 | 28525 | 28544 | ACAACAGGCTCTGGTTCCAT | 38 | 2989 |
| 501892 | 28530 | 28549 | TCTGAACAACAGGCTCTGGT | 19 | 2990 |
| 501893 | 28535 | 28554 | TGTCCTCTGAACAACAGGCT | 52 | 2991 |
| 501894 | 28540 | 28559 | ATCCTTGTCCTCTGAACAAC | 36 | 2992 |
| 501895 | 28545 | 28564 | GCCTAATCCTTGTCCTCTGA | 54 | 2993 |
| 501896 | 28550 | 28569 | TCAGAGCCTAATCCTTGTCC | 53 | 2994 |
| 501897 | 28555 | 28574 | CTTTCTCAGAGCCTAATCCT | 39 | 2995 |
| 501898 | 28560 | 28579 | CCTTCCTTTCTCAGAGCCTA | 50 | 2996 |
| 501899 | 28565 | 28584 | AATGACCTTCCTTTCTCAGA | 19 | 2997 |
| 501900 | 28570 | 28589 | CACCAAATGACCTTCCTTTC | 66 | 2998 |
| 413433 | 32431 | 32450 | GCCTGGACAAGTCCTGCCCA | 79 | 425 |

TABLE 44
Inhibition of DGAT2 mRNA by 5-10-5 MOE
gapmers targeting SEQ ID NO: 2

| | SEQ ID | SEQ ID | | | |
|---|---|---|---|---|---|
| | NO: 2 | NO: 2 | | % | SEQ |
| ISIS | Start | Stop | | inhi- | ID |
| NO | Site | Site | Sequence | bition | NO |
| 501901 | 28575 | 28594 | AAATCCACCAAATGACCTTC | 42 | 2999 |
| 501902 | 28580 | 28599 | GAACTAAATCCACCAAATGA | 13 | 3000 |
| 501903 | 28585 | 28604 | AGGATGAACTAAATCCACCA | 65 | 3001 |
| 501904 | 28590 | 28609 | GCAAAAGGATGAACTAAATC | 4 | 3002 |
| 501905 | 28595 | 28614 | GAAGAGCAAAAGGATGAACT | 0 | 3003 |
| 501906 | 28600 | 28619 | CACAGGAAGAGCAAAAGGAT | 0 | 3004 |
| 501907 | 28605 | 28624 | CCAAACACAGGAAGAGCAAA | 0 | 3005 |
| 501908 | 28610 | 28629 | AGAAACCAAACACAGGAAGA | 33 | 3006 |
| 501909 | 28615 | 28634 | GCCCCAGAAACCAAACACAG | 20 | 3007 |
| 501910 | 28620 | 28639 | CTCCAGCCCCAGAAACCAAA | 45 | 3008 |
| 501911 | 28625 | 28644 | AATCTCTCCAGCCCCAGAAA | 36 | 3009 |
| 501912 | 28787 | 28806 | CCTGGCCTTTCTCAGCTGGG | 25 | 3010 |
| 501913 | 28792 | 28811 | TCTAGCCTGGCCTTTCTCAG | 0 | 3011 |
| 501914 | 28797 | 28816 | TGAATTCTAGCCTGGCCTTT | 44 | 3012 |
| 501915 | 28802 | 28821 | GAGACTGAATTCTAGCCTGG | 48 | 3013 |
| 501916 | 28807 | 28826 | ATCCAGAGACTGAATTCTAG | 71 | 3014 |
| 501917 | 28829 | 28848 | AGAAGAAGAGGCCTGATGGG | 29 | 3015 |
| 501918 | 28834 | 28853 | GATGGAGAAGAAGAGGCCTG | 59 | 3016 |
| 501919 | 28839 | 28858 | GCCTGGATGGAGAAGAAGAG | 0 | 3017 |
| 501920 | 28844 | 28863 | AGGCAGCCTGGATGGAGAAG | 5 | 3018 |
| 501921 | 28849 | 28868 | TGCTGAGGCAGCCTGGATGG | 26 | 3019 |
| 501922 | 28854 | 28873 | TCTGCTGCTGAGGCAGCCTG | 12 | 3020 |
| 501923 | 28859 | 28878 | CTTACTCTGCTGCTGAGGCA | 47 | 3021 |
| 501924 | 28864 | 28883 | TTGTCCTTACTCTGCTGCTG | 55 | 3022 |
| 501925 | 28901 | 28920 | GGCTGGTCTCTCTGGGAAGG | 25 | 3023 |
| 501926 | 28906 | 28925 | TAGAGGGCTGGTCTCTCTGG | 40 | 3024 |
| 501927 | 28911 | 28930 | CTGCTTAGAGGGCTGGTCTC | 40 | 3025 |
| 501928 | 28916 | 28935 | CCCCACTGCTTAGAGGGCTG | 34 | 3026 |
| 501929 | 28921 | 28940 | CCAGGCCCCACTGCTTAGAG | 26 | 3027 |
| 501930 | 28926 | 28945 | GAGCTCCAGGCCCCACTGCT | 7 | 3028 |
| 501931 | 28986 | 29005 | GGAAACCTAGCTTCCAGAAA | 53 | 3029 |
| 501932 | 29010 | 29029 | TTTAGGCTATGGTCTGAGCA | 78 | 3030 |
| 501933 | 29015 | 29034 | TGAGGTTTAGGCTATGGTCT | 68 | 3031 |
| 501934 | 29044 | 29063 | GATGCTCCAGGTGGGCCAGA | 68 | 3032 |
| 501935 | 29049 | 29068 | AGGTGGATGCTCCAGGTGGG | 0 | 3033 |
| 501936 | 29054 | 29073 | CCTCTAGGTGGATGCTCCAG | 18 | 3034 |
| 501937 | 29059 | 29078 | GGCATCCTCTAGGTGGATGC | 22 | 3035 |
| 501938 | 29064 | 29083 | CTAGTGGCATCCTCTAGGTG | 50 | 3036 |
| 501939 | 29069 | 29088 | CTCCTCTAGTGGCATCCTCT | 33 | 3037 |
| 501940 | 29074 | 29093 | CCAGGCTCCTCTAGTGGCAT | 55 | 3038 |
| 501941 | 29079 | 29098 | GGCATCCAGGCTCCTCTAGT | 53 | 3039 |
| 501942 | 29103 | 29122 | GACTCTAGCCCCCCAGACTC | 29 | 3040 |
| 501943 | 29139 | 29158 | TCTGCCTGATTCCCTTTCTT | 30 | 3041 |
| 501944 | 29144 | 29163 | AGCAGTCTGCCTGATTCCCT | 81 | 3042 |
| 501945 | 29149 | 29168 | TGTTCAGCAGTCTGCCTGAT | 50 | 3043 |
| 501946 | 29154 | 29173 | CTTACTGTTCAGCAGTCTGC | 70 | 3044 |
| 501947 | 29159 | 29178 | TCATACTTACTGTTCAGCAG | 65 | 3045 |
| 501948 | 29164 | 29183 | CAAAGTCATACTTACTGTTC | 29 | 3046 |
| 501949 | 29169 | 29188 | GCCTACAAAGTCATACTTAC | 17 | 3047 |
| 501950 | 29193 | 29212 | GGTGAATAGCTATGTCTAAA | 80 | 3048 |
| 501951 | 29198 | 29217 | AGCTTGGTGAATAGCTATGT | 76 | 3049 |
| 501952 | 29222 | 29241 | AGCAAACTGTGAAAAGCTTA | 59 | 3050 |
| 501953 | 29227 | 29246 | TTAAAAGCAAACTGTGAAAA | 2 | 3051 |
| 501954 | 29232 | 29251 | GCCTGTTAAAAGCAAACTGT | 48 | 3052 |
| 501955 | 29237 | 29256 | CAAGAGCCTGTTAAAAGCAA | 12 | 3053 |
| 501956 | 29242 | 29261 | GCCTACAAGAGCCTGTTAAA | 30 | 3054 |
| 501957 | 29247 | 29266 | GTGCAGCCTACAAGAGCCTG | 69 | 3055 |
| 501958 | 29252 | 29271 | AGCATGTGCAGCCTACAAGA | 57 | 3056 |
| 501959 | 29257 | 29276 | AGGGAAGCATGTGCAGCCTA | 76 | 3057 |
| 501960 | 29262 | 29281 | TTTCTAGGGAAGCATGTGCA | 76 | 3058 |
| 501961 | 29267 | 29286 | ACAAGTTTCTAGGGAAGCAT | 40 | 3059 |
| 501962 | 29272 | 29291 | GGAAGACAAGTTTCTAGGGA | 52 | 3060 |
| 501963 | 29277 | 29296 | AGAAGGGAAGACAAGTTTCT | 30 | 3061 |
| 501964 | 29282 | 29301 | ATCGCAGAAGGGAAGACAAG | 28 | 3062 |
| 501965 | 29327 | 29346 | AGTGACGAGATGTCCAATTT | 59 | 3063 |
| 501966 | 29361 | 29380 | ACAACTCTCTTGTTGGGAGG | 71 | 3064 |
| 501967 | 29366 | 29385 | AGGGTACAACTCTCTTGTTG | 59 | 3065 |
| 501968 | 29371 | 29390 | AAAACAGGGTACAACTCTCT | 73 | 3066 |
| 501969 | 29376 | 29395 | AGCTAAAAACAGGGTACAAC | 13 | 3067 |
| 501970 | 29383 | 29402 | CCAGGGTAGCTAAAAACAGG | 3 | 3068 |
| 501971 | 29388 | 29407 | TCTCCCCAGGGTAGCTAAAA | 0 | 3069 |
| 501972 | 29393 | 29412 | CAGCCTCTCCCCAGGGTAGC | 33 | 3070 |
| 501973 | 29417 | 29436 | TAGCCCTGTTCTAGACTCCT | 36 | 3071 |
| 501974 | 29440 | 29459 | TAGCCCCTTGTTGCCCCCCA | 43 | 3072 |
| 501975 | 29445 | 29464 | AATGGTAGCCCCTTGTTGCC | 11 | 3073 |
| 501976 | 29450 | 29469 | AGGGAAATGGTAGCCCCTTG | 63 | 3074 |
| 501977 | 29475 | 29494 | GTAGACTCTCCATGAGCCTA | 60 | 3075 |
| 413433 | 32431 | 32450 | GCCTGGACAAGTCCTGCCCA | 77 | 425 |

TABLE 45
Inhibition of DGAT2 mRNA by 5-10-5 MOE
gapmers targeting SEQ ID NO: 2

| | SEQ ID | SEQ ID | | | |
|---|---|---|---|---|---|
| | NO: 2 | NO: 2 | | % | SEQ |
| ISIS | Start | Stop | | inhi- | ID |
| NO | Site | Site | Sequence | bition | NO |
| 501978 | 30937 | 30956 | GGGCCCACAAACCCTGAGAA | 20 | 3076 |
| 501979 | 30962 | 30981 | AGGCACACCCAGGGCCATGG | 68 | 3077 |
| 501980 | 30967 | 30986 | AAGCTAGGCACACCCAGGGC | 48 | 3078 |
| 501981 | 30972 | 30991 | GCACTAAGCTAGGCACACCC | 77 | 3079 |
| 501982 | 30977 | 30996 | CTGTGGCACTAAGCTAGGCA | 78 | 3080 |
| 501983 | 30982 | 31001 | GTTTACTGTGGCACTAAGCT | 80 | 3081 |
| 501984 | 30987 | 31006 | TGAGTGTTTACTGTGGCACT | 56 | 3082 |
| 501985 | 31026 | 31045 | ACTGGGCTTCATCTCCCCTC | 0 | 3083 |
| 501986 | 31031 | 31050 | GTCCTACTGGGCTTCATCTC | 28 | 3084 |
| 501987 | 31074 | 31093 | GGCACTGCAGGCCACTCCTG | 41 | 3085 |
| 501988 | 31185 | 31204 | AAGGGAGGCCTTGCACTTAC | 26 | 3086 |
| 501989 | 31236 | 31255 | GCCCTTCAGCTTGTGCAGGG | 36 | 3087 |
| 501990 | 31241 | 31260 | ATGAGGCCCTTCAGCTTGTG | 57 | 3088 |
| 501991 | 31246 | 31265 | TCAGGATGAGGCCCTTCAGC | 67 | 3089 |
| 501992 | 31251 | 31270 | AGCACTCAGGATGAGGCCCT | 50 | 3090 |
| 501993 | 31274 | 31293 | ACAAAGTGGGTGTTAAAAGA | 22 | 3091 |
| 501994 | 31279 | 31298 | TTTTCACAAAGTGGGTGTTA | 40 | 3092 |
| 501995 | 31315 | 31334 | GCTTTTAACCTCCCCCCAAA | 6 | 3093 |
| 501996 | 31366 | 31385 | CCTCGACTGAGTGTGAACTC | 66 | 3094 |
| 501997 | 31371 | 31390 | CAAACCCTCGACTGAGTGTG | 46 | 3095 |
| 501998 | 31376 | 31395 | TTATGCAAACCCTCGACTGA | 24 | 3096 |
| 501999 | 31490 | 31509 | ACATTTGGGCAAGGCAGACA | 14 | 3097 |
| 502000 | 31525 | 31544 | AGGGAATAAAATACAGAGTT | 0 | 3098 |
| 502001 | 31530 | 31549 | CTTCCAGGGAATAAAATACA | 0 | 3099 |
| 502002 | 31535 | 31554 | GCCACCTTCCAGGGAATAAA | 0 | 3100 |
| 502003 | 31540 | 31559 | CTCCTGCCACCTTCCAGGGA | 0 | 3101 |
| 502004 | 31545 | 31564 | GTGACCTCCTGCCACCTTCC | 54 | 3102 |
| 502005 | 31606 | 31625 | TTTACCTGGATGGGAAAGTA | 0 | 3103 |
| 502006 | 31612 | 31631 | CAGCACTTTACCTGGATGGG | 2 | 3104 |
| 502007 | 31617 | 31636 | ACTCACAGCACTTTACCTGG | 0 | 3105 |
| 502008 | 31622 | 31641 | ACAACACTCACAGCACTTTA | 1 | 3106 |
| 502009 | 31688 | 31707 | ACTTGCTTCCCTGTGGGTGG | 0 | 3107 |
| 502010 | 31693 | 31712 | TCTAAACTTGCTTCCCTGTG | 16 | 3108 |
| 502011 | 31698 | 31717 | CTTGGTCTAAACTTGCTTCC | 60 | 3109 |
| 502012 | 31703 | 31722 | ACCAACTTGGTCTAAACTTG | 57 | 3110 |
| 502013 | 31768 | 31787 | GGATACTCAGAAGAGCAGTG | 79 | 3111 |
| 502014 | 31792 | 31811 | CCTCAGGGCTGGCCCAAAGA | 61 | 3112 |
| 502015 | 31797 | 31816 | CAGGACCTCAGGGCTGGCCC | 74 | 3113 |
| 502016 | 31802 | 31821 | CCTGTCAGGACCTCAGGGCT | 40 | 3114 |
| 502017 | 31807 | 31826 | ATTTCCCTGTCAGGACCTCA | 46 | 3115 |
| 502018 | 31828 | 31847 | TGAAAGCCAAACTGAGCCAC | 55 | 3116 |
| 502019 | 31866 | 31885 | AGCTTGCAGACCAGGCAGGG | 60 | 3117 |
| 502020 | 31871 | 31890 | AGCCCAGCTTGCAGACCAGG | 55 | 3118 |
| 502021 | 31876 | 31895 | TCACCAGCCCAGCTTGCAGA | 30 | 3119 |
| 502022 | 31881 | 31900 | GTGCCTCACCAGCCCAGCTT | 49 | 3120 |
| 502023 | 31904 | 31923 | ACATGCATCAGGGCCAGATG | 35 | 3121 |
| 502024 | 31932 | 31951 | AGTTATCCTCAATTCACCAG | 66 | 3122 |
| 502025 | 31937 | 31956 | GCCAGAGTTATCCTCAATTC | 76 | 3123 |
| 502026 | 31942 | 31961 | ATCCTGCCAGAGTTATCCTC | 71 | 3124 |
| 502027 | 31947 | 31966 | TCAGGATCCTGCCAGAGTTA | 63 | 3125 |
| 502028 | 31952 | 31971 | AACCTTCAGGATCCTGCCAG | 60 | 3126 |
| 502029 | 31957 | 31976 | GGGAAAACCTTCAGGATCCT | 51 | 3127 |
| 502030 | 31975 | 31994 | ACAGGTCTTTCCCCTGTGGG | 31 | 3128 |
| 502031 | 31980 | 31999 | GCCAGACAGGTCTTTCCCCT | 65 | 3129 |
| 502032 | 32052 | 32071 | CTTCAGCACCCCTACCTTCT | 45 | 3130 |
| 502033 | 32057 | 32076 | CCACTCTTCAGCACCCCTAC | 53 | 3131 |
| 502034 | 32062 | 32081 | TGCCTCCACTCTTCAGCACC | 60 | 3132 |
| 502035 | 32110 | 32129 | ATATACACCACCCTGCACCC | 30 | 3133 |
| 502036 | 32115 | 32134 | AGCAAATATACACCACCCTG | 67 | 3134 |
| 502037 | 32120 | 32139 | ACAACAGCAAATATACACCA | 73 | 3135 |
| 502038 | 32125 | 32144 | GACTCACAACAGCAAATATA | 68 | 3136 |
| 502039 | 32130 | 32149 | TCACTGACTCACAACAGCAA | 60 | 3137 |
| 502040 | 32135 | 32154 | CTCAGTCACTGACTCACAAC | 83 | 3138 |
| 502041 | 32140 | 32159 | AGGATCTCAGTCACTGACTC | 68 | 3139 |
| 502042 | 32146 | 32165 | CACACCAGGATCTCAGTCAC | 61 | 3140 |
| 502043 | 32167 | 32186 | CCAGCCACTGCCCCCAGGCA | 38 | 3141 |
| 502044 | 32172 | 32191 | GTTACCCAGCCACTGCCCCC | 33 | 3142 |
| 502045 | 32177 | 32196 | GCAGGGTTACCCAGCCACTG | 76 | 3143 |
| 502046 | 32182 | 32201 | AGGATGCAGGGTTACCCAGC | 80 | 3144 |
| 502047 | 32187 | 32206 | AGTGAAGGATGCAGGGTTAC | 13 | 3145 |
| 502048 | 32192 | 32211 | AATGCAGTGAAGGATGCAGG | 52 | 3146 |
| 502049 | 32223 | 32242 | AGGAGCTGGCCCTGCCACCC | 48 | 3147 |
| 502050 | 32228 | 32247 | GCAGAAGGAGCTGGCCCTGC | 64 | 3148 |
| 502051 | 32233 | 32252 | GATGAGCAGAAGGAGCTGGC | 56 | 3149 |
| 502052 | 32238 | 32257 | CTAAGGATGAGCAGAAGGAG | 42 | 3150 |
| 502053 | 32243 | 32262 | TTAGGCTAAGGATGAGCAGA | 60 | 3151 |
| 502054 | 32248 | 32267 | TGGGCTTAGGCTAAGGATGA | 53 | 3152 |
| 413433 | 32431 | 32450 | GCCTGGACAAGTCCTGCCCA | 79 | 425 |

TABLE 46
Inhibition of DGAT2 mRNA by 5-10-5 MOE
gapmers targeting SEQ ID NO: 2

| | SEQ ID | SEQ ID | | | |
|---|---|---|---|---|---|
| | NO: 2 | NO: 2 | | % | SEQ |
| ISIS | Start | Stop | | inhi- | ID |
| NO | Site | Site | Sequence | bition | NO |
| 413433 | 32431 | 32450 | GCCTGGACAAGTCCTGCCCA | 77 | 425 |
| 502055 | 33408 | 33427 | TCTTCATTACATGATTACTG | 66 | 3153 |
| 502056 | 33413 | 33432 | GCAGATCTTCATTACATGAT | 81 | 3154 |
| 502057 | 33449 | 33468 | ACCAGGAAGGGAGTAGGTGG | 0 | 3155 |
| 502058 | 33454 | 33473 | GTCCCACCAGGAAGGGAGTA | 0 | 3156 |
| 502059 | 33459 | 33478 | CCAGAGTCCCACCAGGAAGG | 0 | 3157 |
| 502060 | 33464 | 33483 | AAAGACCAGAGTCCCACCAG | 15 | 3158 |
| 502061 | 33489 | 33508 | GGGCCAGATGAGCTGTTCTG | 26 | 3159 |
| 502062 | 33513 | 33532 | GTGCCAACAGAAGGGATACA | 68 | 3160 |
| 502063 | 33518 | 33537 | CACCTGTGCCAACAGAAGGG | 36 | 3161 |
| 502064 | 33523 | 33542 | AACCCCACCTGTGCCAACAG | 53 | 3162 |
| 502065 | 33557 | 33576 | GGCTGGTGGTCTCGGTGGCT | 61 | 3163 |
| 502066 | 33562 | 33581 | CAGGTGGCTGGTGGTCTCGG | 38 | 3164 |
| 502067 | 33567 | 33586 | TCTTCCAGGTGGCTGGTGGT | 32 | 3165 |
| 502068 | 33572 | 33591 | GCTCCTCTTCCAGGTGGCTG | 61 | 3166 |
| 502069 | 33577 | 33596 | TGTCTGCTCCTCTTCCAGGT | 63 | 3167 |
| 502070 | 33582 | 33601 | GGCACTGTCTGCTCCTCTTC | 64 | 3168 |
| 502071 | 33636 | 33655 | TTCCTAGTCTCCTCTCCAAG | 24 | 3169 |
| 502072 | 33658 | 33677 | ATTCTAAGCTTAGAGAGAGT | 28 | 3170 |
| 502073 | 33663 | 33682 | AGGTGATTCTAAGCTTAGAG | 53 | 3171 |
| 502074 | 33668 | 33687 | TGGACAGGTGATTCTAAGCT | 66 | 3172 |
| 502075 | 33673 | 33692 | GCAGATGGACAGGTGATTCT | 72 | 3173 |
| 502076 | 33678 | 33697 | ATGAGGCAGATGGACAGGTG | 66 | 3174 |
| 502077 | 33683 | 33702 | GTGAAATGAGGCAGATGGAC | 52 | 3175 |
| 502078 | 33688 | 33707 | TATCAGTGAAATGAGGCAGA | 16 | 3176 |
| 502079 | 33693 | 33712 | AAGCCTATCAGTGAAATGAG | 8 | 3177 |
| 502080 | 33698 | 33717 | TCAGTAAGCCTATCAGTGAA | 0 | 3178 |
| 502081 | 33703 | 33722 | GTGCCTCAGTAAGCCTATCA | 56 | 3179 |
| 502082 | 33708 | 33727 | TCTCTGTGCCTCAGTAAGCC | 32 | 3180 |
| 502083 | 33729 | 33748 | TGACCTTGGGATAGTCCCTC | 84 | 3181 |
| 502084 | 33734 | 33753 | CTTTGTGACCTTGGGATAGT | 61 | 3182 |
| 502085 | 33740 | 33759 | CTTAAGCTTTGTGACCTTGG | 69 | 3183 |
| 502086 | 33745 | 33764 | TACTACTTAAGCTTTGTGAC | 59 | 3184 |
| 502087 | 33750 | 33769 | CCTGCTACTACTTAAGCTTT | 30 | 3185 |
| 502088 | 33755 | 33774 | CTAGTCCTGCTACTACTTAA | 43 | 3186 |
| 502089 | 33760 | 33779 | CTACACTAGTCCTGCTACTA | 16 | 3187 |
| 502090 | 33765 | 33784 | GGTTCCTACACTAGTCCTGC | 59 | 3188 |
| 502091 | 33802 | 33821 | CAGGAGTAAGACCATGGGCC | 59 | 3189 |
| 502092 | 33807 | 33826 | TAACACAGGAGTAAGACCAT | 57 | 3190 |
| 502093 | 33812 | 33831 | GAAAGTAACACAGGAGTAAG | 45 | 3191 |
| 502094 | 33817 | 33836 | ATGGTGAAAGTAACACAGGA | 54 | 3192 |
| 502095 | 33846 | 33865 | TGCTTAAGTTTACACAGCAC | 66 | 3193 |
| 502096 | 33851 | 33870 | AGGCTTGCTTAAGTTTACAC | 62 | 3194 |
| 502097 | 33856 | 33875 | AGCAAAGGCTTGCTTAAGTT | 65 | 3195 |
| 502098 | 33861 | 33880 | AGAAGAGCAAAGGCTTGCTT | 79 | 3196 |
| 502099 | 33866 | 33885 | CCCACAGAAGAGCAAAGGCT | 80 | 3197 |
| 502100 | 33871 | 33890 | TCAGACCCACAGAAGAGCAA | 69 | 3198 |
| 502101 | 33893 | 33912 | AGCAGTGCATAGAGGAAAAA | 16 | 3199 |
| 502102 | 33898 | 33917 | ACCACAGCAGTGCATAGAGG | 60 | 3200 |
| 502103 | 33903 | 33922 | GTCCCACCACAGCAGTGCAT | 49 | 3201 |
| 502104 | 33908 | 33927 | GGCTTGTCCCACCACAGCAG | 42 | 3202 |
| 502105 | 33913 | 33932 | AGATAGGCTTGTCCCACCAC | 54 | 3203 |
| 502106 | 33918 | 33937 | TGCTCAGATAGGCTTGTCCC | 71 | 3204 |
| 502107 | 33958 | 33977 | CAAGTCACTCTTTATACCCT | 53 | 3205 |
| 502108 | 33963 | 33982 | CCTATCAAGTCACTCTTTAT | 18 | 3206 |
| 502109 | 33968 | 33987 | ACATTCCTATCAAGTCACTC | 58 | 3207 |
| 502110 | 34017 | 34036 | CCCAACACGATGCCCAGGCC | 70 | 3208 |
| 502111 | 34053 | 34072 | TCCTCTTGCTGCCTGTTTCC | 34 | 3209 |
| 502112 | 34058 | 34077 | TTGTGTCCTCTTGCTGCCTG | 59 | 3210 |
| 502113 | 34063 | 34082 | TGCTCTTGTGTCCTCTTGCT | 68 | 3211 |
| 502114 | 34098 | 34117 | AAGGATACCGCCAATGAAGG | 65 | 3212 |
| 502115 | 34155 | 34174 | TCATGTCACACTCCCCTCCC | 58 | 3213 |
| 502116 | 34179 | 34198 | CATCTGACCAGCTCTGATCT | 52 | 3214 |
| 502117 | 34184 | 34203 | GTAGGCATCTGACCAGCTCT | 68 | 3215 |
| 502118 | 34189 | 34208 | AGAATGTAGGCATCTGACCA | 57 | 3216 |
| 502119 | 34211 | 34230 | TGCCCTTGCTGTAGGACCCA | 84 | 3217 |
| 502120 | 34216 | 34235 | GTCAATGCCCTTGCTGTAGG | 70 | 3218 |
| 502121 | 34221 | 34240 | TGCAAGTCAATGCCCTTGCT | 44 | 3219 |
| 502122 | 34226 | 34245 | CACAGTGCAAGTCAATGCCC | 62 | 3220 |
| 502123 | 34231 | 34250 | TGGGACACAGTGCAAGTCAA | 55 | 3221 |
| 502124 | 34267 | 34286 | AGGCTCTGATGGGACATTTG | 65 | 3222 |
| 502125 | 34301 | 34320 | CAGGTGGCTCTTTAAATCAT | 59 | 3223 |
| 502126 | 34306 | 34325 | GGCCCCAGGTGGCTCTTTAA | 32 | 3224 |
| 502127 | 34312 | 34331 | CCAGTGGGCCCCAGGTGGCT | 63 | 3225 |
| 502128 | 34317 | 34336 | GTCACCCAGTGGGCCCCAGG | 46 | 3226 |
| 502129 | 34340 | 34359 | CCTGGGCTGCTGGATGAAGA | 0 | 3227 |
| 502130 | 34345 | 34364 | TTTTCCCTGGGCTGCTGGAT | 28 | 3228 |
| 502131 | 34350 | 34369 | TGCACTTTTCCCTGGGCTGC | 70 | 3229 |

TABLE 47
Inhibition of DGAT2 mRNA by 5-10-5 MOE
gapmers targeting SEQ ID NO: 2

| | SEQ ID | SEQ ID | | | |
|---|---|---|---|---|---|
| | NO: 2 | NO: 2 | | % | SEQ |
| ISIS | Start | Stop | | inhi- | ID |
| NO | Site | Site | Sequence | bition | NO |
| 413433 | 32431 | 32450 | GCCTGGACAAGTCCTGCCCA | 78 | 425 |
| 502132 | 34391 | 34410 | TCACAGCAAATTATCCTGCA | 49 | 3230 |
| 502133 | 34396 | 34415 | GGAGGTCACAGCAAATTATC | 41 | 3231 |
| 502134 | 34401 | 34420 | CCTGTGGAGGTCACAGCAAA | 52 | 3232 |
| 502135 | 34460 | 34479 | TAAGCCATTCCTTGGATGAC | 72 | 3233 |
| 502136 | 34465 | 34484 | AGGTCTAAGCCATTCCTTGG | 58 | 3234 |
| 502137 | 34470 | 34489 | CTGAAAGGTCTAAGCCATTC | 59 | 3235 |
| 502138 | 34553 | 34572 | TTTGTCCCCTTCCTATGGCT | 49 | 3236 |
| 502139 | 34605 | 34624 | CAGGCCTGGGATAGTTACCC | 8 | 3237 |
| 502140 | 34610 | 34629 | ATGGCCAGGCCTGGGATAGT | 33 | 3238 |
| 502141 | 34615 | 34634 | AGCTGATGGCCAGGCCTGGG | 7 | 3239 |
| 502142 | 34620 | 34639 | TCCTGAGCTGATGGCCAGGC | 40 | 3240 |
| 502143 | 34625 | 34644 | CTTGCTCCTGAGCTGATGGC | 20 | 3241 |
| 502144 | 34630 | 34649 | GGAAACTTGCTCCTGAGCTG | 62 | 3242 |
| 502145 | 34635 | 34654 | AACTTGGAAACTTGCTCCTG | 52 | 3243 |
| 502146 | 34640 | 34659 | TGGGAAACTTGGAAACTTGC | 66 | 3244 |
| 502147 | 34676 | 34695 | GGCATTGAGGGAAGAGCTGG | 42 | 3245 |
| 502148 | 34681 | 34700 | AGGCAGGCATTGAGGGAAGA | 53 | 3246 |
| 502149 | 34686 | 34705 | AAGGCAGGCAGGCATTGAGG | 62 | 3247 |
| 502150 | 34691 | 34710 | TGAAAAAGGCAGGCAGGCAT | 63 | 3248 |
| 502151 | 34696 | 34715 | TTTGATGAAAAAGGCAGGCA | 49 | 3249 |
| 502152 | 34701 | 34720 | CTAGTTTTGATGAAAAAGGC | 53 | 3250 |
| 502153 | 34706 | 34725 | TTGTGCTAGTTTTGATGAAA | 41 | 3251 |
| 502154 | 34739 | 34758 | TAGCTCTCAGTGAAGCTGGA | 83 | 3252 |
| 502155 | 34826 | 34845 | GAGCAGATCTCAAAATCTCG | 70 | 3253 |
| 502156 | 34868 | 34887 | ACAGCAGCAGTCTAATCCAT | 73 | 3254 |
| 502157 | 34873 | 34892 | GGGAAACAGCAGCAGTCTAA | 49 | 3255 |
| 502158 | 34878 | 34897 | TAAATGGGAAACAGCAGCAG | 62 | 3256 |
| 502159 | 34883 | 34902 | CCAAATAAATGGGAAACAGC | 15 | 3257 |
| 502160 | 34888 | 34907 | ACTCCCCAAATAAATGGGAA | 13 | 3258 |
| 502161 | 34893 | 34912 | CAGCTACTCCCCAAATAAAT | 0 | 3259 |
| 502162 | 34898 | 34917 | ACTCTCAGCTACTCCCCAAA | 56 | 3260 |
| 502163 | 34903 | 34922 | AACCAACTCTCAGCTACTCC | 76 | 3261 |
| 502164 | 34931 | 34950 | CAAACAGATTAAAGTTGCTC | 80 | 3262 |
| 502165 | 35006 | 35025 | AATGTGAGCAAGACTCCCTC | 58 | 3263 |
| 502166 | 35167 | 35186 | TTGGGAGCCTCCTGGCAGAG | 0 | 3264 |
| 502167 | 35192 | 35211 | GCCCAGGTTTTCTGTGACTC | 65 | 3265 |
| 502168 | 35197 | 35216 | CAAGAGCCCAGGTTTTCTGT | 53 | 3266 |
| 502169 | 35220 | 35239 | GTCACTGGCCACCAGCAGAA | 44 | 3267 |
| 502170 | 35225 | 35244 | GCAGAGTCACTGGCCACCAG | 59 | 3268 |
| 502171 | 35230 | 35249 | TGGAAGCAGAGTCACTGGCC | 48 | 3269 |
| 502172 | 35263 | 35282 | TGCAAAGTGCCCCTTCCCTG | 67 | 3270 |
| 502173 | 35268 | 35287 | AGTGCTGCAAAGTGCCCCTT | 61 | 3271 |
| 502174 | 35273 | 35292 | ACCTGAGTGCTGCAAAGTGC | 61 | 3272 |
| 502175 | 35278 | 35297 | CTCCCACCTGAGTGCTGCAA | 83 | 3273 |
| 502176 | 35283 | 35302 | TGACACTCCCACCTGAGTGC | 60 | 3274 |
| 502177 | 35288 | 35307 | ATCAATGACACTCCCACCTG | 59 | 3275 |
| 502178 | 35318 | 35337 | TTTTGGCTGCCCTGCCTCAA | 36 | 3276 |
| 502179 | 35323 | 35342 | GGTCTTTTTGGCTGCCCTGC | 82 | 3277 |
| 502180 | 35345 | 35364 | GATAACAAGGAATGAACACG | 8 | 3278 |
| 502181 | 35350 | 35369 | TCCTGGATAACAAGGAATGA | 36 | 3279 |
| 502182 | 35356 | 35375 | TACAATTCCTGGATAACAAG | 0 | 3280 |
| 502183 | 35361 | 35380 | AGAAATACAATTCCTGGATA | 9 | 3281 |
| 502184 | 35366 | 35385 | CTTCTAGAAATACAATTCCT | 37 | 3282 |
| 502185 | 35371 | 35390 | ACAAACTTCTAGAAATACAA | 0 | 3283 |
| 502186 | 35376 | 35395 | GTGAAACAAACTTCTAGAAA | 62 | 3284 |
| 502187 | 35401 | 35420 | TTTGTCCACATATCTGATTG | 40 | 3285 |
| 502188 | 35406 | 35425 | TTATCTTTGTCCACATATCT | 44 | 3286 |
| 502189 | 35411 | 35430 | ATACCTTATCTTTGTCCACA | 81 | 3287 |
| 502190 | 35416 | 35435 | AATAAATACCTTATCTTTGT | 0 | 3288 |
| 502191 | 35421 | 35440 | GCTTCAATAAATACCTTATC | 88 | 3289 |
| 502192 | 35426 | 35445 | GTAATGCTTCAATAAATACC | 67 | 3290 |
| 502193 | 35431 | 35450 | TAGAAGTAATGCTTCAATAA | 0 | 3291 |
| 502194 | 35436 | 35455 | CCTCTTAGAAGTAATGCTTC | 75 | 3292 |
| 502195 | 35441 | 35460 | ATTTCCCTCTTAGAAGTAAT | 30 | 3293 |
| 502196 | 35446 | 35465 | CCAAAATTTCCCTCTTAGAA | 39 | 3294 |
| 502197 | 35519 | 35538 | TATTCTACAGCACAGCTCTC | 24 | 3295 |
| 502198 | 35560 | 35579 | TCAAAATCCCTCAGTTCCAT | 25 | 3296 |
| 502199 | 35565 | 35584 | CCTTATCAAAATCCCTCAGT | 53 | 3297 |
| 502200 | 35570 | 35589 | TCTGTCCTTATCAAAATCCC | 23 | 3298 |
| 502201 | 35575 | 35594 | AGCTATCTGTCCTTATCAAA | 8 | 3299 |
| 502202 | 35607 | 35626 | ATCATTTTTATATCATTTTC | 0 | 3300 |
| 502203 | 35612 | 35631 | TTGATATCATTTTTATATCA | 0 | 3301 |
| 502204 | 35617 | 35636 | ATGGGTTGATATCATTTTTA | 61 | 3302 |
| 502205 | 35622 | 35641 | GTTATATGGGTTGATATCAT | 48 | 3303 |
| 502206 | 35627 | 35646 | TTGAGGTTATATGGGTTGAT | 68 | 3304 |
| 502207 | 35632 | 35651 | CAAAATTGAGGTTATATGGG | 19 | 3305 |
| 502208 | 35656 | 35675 | ATACATGCTCTTTTTCAAAA | 45 | 3306 |

TABLE 48
Inhibition of DGAT2 mRNA by 5-10-5 MOE
gapmers targeting SEQ ID NO: 2

| | SEQ ID | SEQ ID | | % inhi- | | |
|---|---|---|---|---|---|---|
| | NO: 2 | NO: 2 | | bition | % inhi- | SEQ |
| ISIS | Start | Stop | | (RTS2988_ | bition | ID |
| NO | Site | Site | Sequence | MGB) | (RTS2367) | NO |
| 413433 | 32431 | 32450 | GCCTGGACAAGTCCTGCCCA | 72 | 77 | 425 |
| 502209 | 37525 | 37544 | CATCTCCCAATGCAGGCCCA | 37 | 34 | 3307 |
| 502210 | 37555 | 37574 | GCCCTGACCCACCATGTCTG | 0 | 27 | 3308 |
| 502211 | 37560 | 37579 | CCTCAGCCCTGACCCACCAT | 19 | 51 | 3309 |
| 502212 | 37565 | 37584 | CTCCTCCTCAGCCCTGACCC | 0 | 8 | 3310 |
| 502213 | 37570 | 37589 | CAGCTCTCCTCCTCAGCCCT | 20 | 33 | 3311 |
| 502214 | 37575 | 37594 | ATGGACAGCTCTCCTCCTCA | 31 | 46 | 3312 |
| 502215 | 37580 | 37599 | ACCATATGGACAGCTCTCCT | 57 | 68 | 3313 |
| 502216 | 37695 | 37714 | GTGCCATGGACAACAATCAG | 0 | 0 | 3314 |
| 502217 | 37700 | 37719 | TTACAGTGCCATGGACAACA | 0 | 23 | 3315 |
| 502218 | 37705 | 37724 | GACAATTACAGTGCCATGGA | 15 | 7 | 3316 |
| 502219 | 37740 | 37759 | AATGCATCAGTCTGGTGGGA | 53 | 59 | 3317 |
| 502220 | 37745 | 37764 | ATCCCAATGCATCAGTCTGG | 66 | 73 | 3318 |
| 502221 | 37804 | 37823 | TGCATTTGGCAAACATTCCC | 36 | 50 | 3319 |
| 502222 | 37809 | 37828 | ACTCATGCATTTGGCAAACA | 42 | 0 | 3320 |
| 502223 | 37814 | 37833 | TGGGAACTCATGCATTTGGC | 62 | 65 | 3321 |
| 502224 | 37819 | 37838 | TGTTTTGGGAACTCATGCAT | 3 | 25 | 3322 |
| 502225 | 37824 | 37843 | AAGGTTGTTTTGGGAACTCA | 44 | 42 | 3323 |
| 502226 | 37829 | 37848 | GATACAAGGTTGTTTTGGGA | 29 | 44 | 3324 |
| 502227 | 37834 | 37853 | CTAATGATACAAGGTTGTTT | 29 | 41 | 3325 |
| 502228 | 37839 | 37858 | TGCAGCTAATGATACAAGGT | 68 | 67 | 3326 |
| 502229 | 37844 | 37863 | TAAAATGCAGCTAATGATAC | 21 | 18 | 3327 |
| 502230 | 37849 | 37868 | ATCTGTAAAATGCAGCTAAT | 13 | 38 | 3328 |
| 502231 | 37854 | 37873 | TCCTCATCTGTAAAATGCAG | 48 | 43 | 3329 |
| 502232 | 37859 | 37878 | CAGTTTCCTCATCTGTAAAA | 8 | 19 | 3330 |
| 502233 | 37864 | 37883 | AGCCTCAGTTTCCTCATCTG | 42 | 44 | 3331 |
| 502234 | 37869 | 37888 | TTCTGAGCCTCAGTTTCCTC | 34 | 54 | 3332 |
| 502235 | 37874 | 37893 | CATTTTTCTGAGCCTCAGTT | 46 | 45 | 3333 |
| 502236 | 37879 | 37898 | CTATTCATTTTTCTGAGCCT | 56 | 65 | 3334 |
| 502237 | 37884 | 37903 | GTAAGCTATTCATTTTTCTG | 50 | 53 | 3335 |
| 502238 | 37889 | 37908 | TCTGTGTAAGCTATTCATTT | 44 | 55 | 3336 |
| 502239 | 37894 | 37913 | CTGGTTCTGTGTAAGCTATT | 55 | 55 | 3337 |
| 502240 | 37899 | 37918 | GTTGTCTGGTTCTGTGTAAG | 31 | 38 | 3338 |
| 502241 | 37904 | 37923 | TTGGAGTTGTCTGGTTCTGT | 52 | 52 | 3339 |
| 502242 | 37989 | 38008 | TGGATCCACTCCCCATCCCC | 0 | 30 | 3340 |
| 502243 | 37994 | 38013 | GCCCATGGATCCACTCCCCA | 0 | 0 | 3341 |
| 502244 | 37999 | 38018 | GGGTTGCCCATGGATCCACT | 0 | 10 | 3342 |
| 502245 | 38004 | 38023 | AGTCAGGGTTGCCCATGGAT | 9 | 13 | 3343 |
| 502246 | 38270 | 38289 | CCAAGGAGTCTGCTGCCCTG | 15 | 16 | 3344 |
| 502247 | 38292 | 38311 | GTCTGGGTCCTGTCTTCAGG | 17 | 15 | 3345 |
| 502248 | 38326 | 38345 | CAGAATGACTGACTCCCTTC | 10 | 19 | 3346 |
| 502249 | 38356 | 38375 | GCAGTCTGGGCTCCAACATC | 0 | 5 | 3347 |
| 502250 | 38361 | 38380 | ACTGTGCAGTCTGGGCTCCA | 0 | 7 | 3348 |
| 502251 | 38366 | 38385 | CCCACACTGTGCAGTCTGGG | 5 | 10 | 3349 |
| 502252 | 38371 | 38390 | CTTGGCCCACACTGTGCAGT | 4 | 8 | 3350 |
| 502253 | 38376 | 38395 | GCAAACTTGGCCCACACTGT | 2 | 0 | 3351 |
| 502254 | 38381 | 38400 | CATGGGCAAACTTGGCCCAC | 21 | 22 | 3352 |
| 502255 | 38386 | 38405 | ACACACATGGGCAAACTTGG | 0 | 0 | 3353 |
| 502256 | 38391 | 38410 | CCCAGACACACATGGGCAAA | 0 | 0 | 3354 |
| 502257 | 38396 | 38415 | GCCCACCCAGACACACATGG | 0 | 5 | 3355 |
| 502258 | 38401 | 38420 | TCTGTGCCCACCCAGACACA | 0 | 13 | 3356 |
| 502259 | 38406 | 38425 | TTGCATCTGTGCCCACCCAG | 5 | 22 | 3357 |
| 502260 | 38411 | 38430 | ACAGGTTGCATCTGTGCCCA | 33 | 45 | 3358 |
| 502261 | 38478 | 38497 | GGCCCCAGGTGGTCCAGTCC | 0 | 4 | 3359 |
| 502262 | 38483 | 38502 | ATTCTGGCCCCAGGTGGTCC | 0 | 10 | 3360 |
| 502263 | 38505 | 38524 | TGGTCTCCCAGCAAAATGAT | 0 | 0 | 3361 |
| 502264 | 38510 | 38529 | CCTCCTGGTCTCCCAGCAAA | 0 | 0 | 3362 |
| 502265 | 38515 | 38534 | CCTGACCTCCTGGTCTCCCA | 0 | 7 | 3363 |
| 502266 | 38520 | 38539 | TCCTTCCTGACCTCCTGGTC | 3 | 16 | 3364 |
| 502267 | 38525 | 38544 | CACCCTCCTTCCTGACCTCC | 0 | 3 | 3365 |
| 502268 | 38595 | 38614 | TTCCAAAGCCTGAGGTAAGG | 18 | 36 | 3366 |
| 502269 | 38600 | 38619 | TCTTCTTCCAAAGCCTGAGG | 14 | 40 | 3367 |
| 502270 | 38605 | 38624 | CAGCCTCTTCTTCCAAAGCC | 10 | 9 | 3368 |
| 502271 | 38630 | 38649 | CTGGCCCAGGGCTGAGCCTG | 0 | 0 | 3369 |
| 502272 | 38676 | 38695 | TCCCTGAAGGCAGGGACTGG | 0 | 10 | 3370 |
| 502273 | 38681 | 38700 | GGTGCTCCCTGAAGGCAGGG | 24 | 28 | 3371 |
| 502274 | 38686 | 38705 | CCCTTGGTGCTCCCTGAAGG | 0 | 15 | 3372 |
| 502275 | 38726 | 38745 | CACACTGTGTTGTCACTGTC | 41 | 44 | 3373 |
| 502276 | 38731 | 38750 | CTCAGCACACTGTGTTGTCA | 38 | 48 | 3374 |
| 502277 | 38736 | 38755 | ACAGTCTCAGCACACTGTGT | 6 | 21 | 3375 |
| 502278 | 38759 | 38778 | AGCCCTGGACTCACCATTGT | 0 | 4 | 3376 |
| 502279 | 38764 | 38783 | CTCTCAGCCCTGGACTCACC | 6 | 8 | 3377 |
| 502280 | 38809 | 38828 | GCCTCTGCCAGGAAGTTCTC | 8 | 6 | 3378 |
| 502281 | 38814 | 38833 | GGCCTGCCTCTGCCAGGAAG | 0 | 51 | 3379 |
| 502282 | 38819 | 38838 | TGCAGGGCCTGCCTCTGCCA | 9 | 2 | 3380 |
| 502283 | 38843 | 38862 | GAATGCCTGTTTTCCACCTC | 34 | 53 | 3381 |
| 502284 | 38848 | 38867 | CTCTGGAATGCCTGTTTTCC | 19 | 27 | 3382 |
| 502285 | 38874 | 38893 | AGGCAAAGGGAAGGCTGAGC | 4 | 23 | 3383 |

TABLE 49
Inhibition of DGAT2 mRNA by 5-10-5 MOE
gapmers targeting SEQ ID NO: 2

| | SEQ ID | SEQ ID | | % inhi- | | |
|---|---|---|---|---|---|---|
| | NO: 2 | NO: 2 | | bition | % inhi- | SEQ |
| ISIS | Start | Stop | | (RTS2988_ | bition | ID |
| NO | Site | Site | Sequence | MGB) | (RTS2367) | NO |
| 413433 | 32431 | 32450 | GCCTGGACAAGTCCTGCCCA | 74 | 73 | 425 |
| 502286 | 38879 | 38898 | CCCCCAGGCAAAGGGAAGGC | 0 | 16 | 3384 |
| 502287 | 38928 | 38947 | GCCTTCTGCCCCACTGCTAG | 0 | 6 | 3385 |
| 502288 | 38933 | 38952 | GATGGGCCTTCTGCCCCACT | 0 | 0 | 3386 |
| 502289 | 38938 | 38957 | GTTCTGATGGGCCTTCTGCC | 0 | 15 | 3387 |
| 502290 | 38943 | 38962 | ACCAGGTTCTGATGGGCCTT | 0 | 42 | 3388 |
| 502291 | 38948 | 38967 | TCTCTACCAGGTTCTGATGG | 0 | 2 | 3389 |
| 502292 | 39030 | 39049 | GGCCCTGGACACTGGCCAAG | 0 | 12 | 3390 |
| 502293 | 39035 | 39054 | CTAGAGGCCCTGGACACTGG | 0 | 16 | 3391 |
| 502294 | 39041 | 39060 | GTCAGCCTAGAGGCCCTGGA | 18 | 40 | 3392 |
| 502295 | 39082 | 39101 | CCAGGGTCTGTCATACCCTA | 0 | 0 | 3393 |
| 502296 | 39087 | 39106 | AGAGGCCAGGGTCTGTCATA | 0 | 0 | 3394 |
| 502297 | 39097 | 39116 | TCTGGAAGGGAGAGGCCAGG | 0 | 0 | 3395 |
| 502298 | 39301 | 39320 | ACCAACAGTGGTGATGGGCT | 7 | 24 | 3396 |
| 502299 | 39306 | 39325 | GGCTTACCAACAGTGGTGAT | 0 | 0 | 3397 |
| 502300 | 39337 | 39356 | GTTCAGGACAGCCCTTGGTC | 25 | 35 | 3398 |
| 502301 | 39342 | 39361 | CCTGTGTTCAGGACAGCCCT | 26 | 31 | 3399 |
| 502302 | 39347 | 39366 | GGCACCCTGTGTTCAGGACA | 41 | 52 | 3400 |
| 502303 | 39377 | 39396 | AATCCCGTCTCTACTGCTGA | 18 | 39 | 3401 |
| 502304 | 39401 | 39420 | TCAGAGCCAGGTGGCCTGCA | 30 | 27 | 3402 |
| 502305 | 39406 | 39425 | GGCCATCAGAGCCAGGTGGC | 0 | 33 | 3403 |
| 502306 | 39411 | 39430 | GGCATGGCCATCAGAGCCAG | 0 | 12 | 3404 |
| 502307 | 39416 | 39435 | CTAAGGGCATGGCCATCAGA | 0 | 23 | 3405 |
| 502308 | 39421 | 39440 | CATGGCTAAGGGCATGGCCA | 0 | 10 | 3406 |
| 502309 | 39426 | 39445 | GTCCTCATGGCTAAGGGCAT | 26 | 29 | 3407 |
| 502310 | 39431 | 39450 | TCAAAGTCCTCATGGCTAAG | 0 | 37 | 3408 |
| 502311 | 39436 | 39455 | ACACTTCAAAGTCCTCATGG | 33 | 52 | 3409 |
| 502312 | 39441 | 39460 | ACCCAACACTTCAAAGTCCT | 44 | 57 | 3410 |
| 502313 | 39446 | 39465 | TCAGCACCCAACACTTCAAA | 35 | 47 | 3411 |
| 502314 | 39514 | 39533 | ATCACAGAGCTTGGTTCATC | 61 | 62 | 3412 |
| 502315 | 39539 | 39558 | GACTGCAGATTTTCTTTCCT | 18 | 40 | 3413 |
| 502316 | 39577 | 39596 | GTCTTCCCTGATAGACTAGT | 43 | 46 | 3414 |
| 502317 | 39614 | 39633 | TCCTCATCACATTCCCCCAC | 37 | 59 | 3415 |
| 502318 | 39665 | 39684 | AGAGTTACCTCCTCCCTGGG | 14 | 25 | 3416 |
| 502319 | 39670 | 39689 | GTGCAAGAGTTACCTCCTCC | 71 | 81 | 3417 |
| 502320 | 39675 | 39694 | TAGCAGTGCAAGAGTTACCT | 61 | 67 | 3418 |
| 502321 | 39680 | 39699 | TCAGTTAGCAGTGCAAGAGT | 38 | 53 | 3419 |
| 502322 | 39685 | 39704 | TCCTATCAGTTAGCAGTGCA | 73 | 75 | 3420 |
| 502323 | 39690 | 39709 | ATAATTCCTATCAGTTAGCA | 32 | 35 | 3421 |
| 502324 | 39695 | 39714 | GCTAGATAATTCCTATCAGT | 25 | 17 | 3422 |
| 502325 | 39700 | 39719 | ATTTTGCTAGATAATTCCTA | 0 | 0 | 3423 |
| 502326 | 39705 | 39724 | CCTCTATTTTGCTAGATAAT | 1 | 26 | 3424 |
| 502327 | 39727 | 39746 | TTCTGATAAAAATTCTCTTC | 10 | 13 | 3425 |
| 502328 | 39732 | 39751 | ATTGTTTCTGATAAAAATTC | 0 | 0 | 3426 |
| 502329 | 39737 | 39756 | AGGCTATTGTTTCTGATAAA | 34 | 31 | 3427 |
| 502330 | 39813 | 39832 | CTATGCTGCAGTCATATTAA | 35 | 26 | 3428 |
| 502331 | 39818 | 39837 | CAGGTCTATGCTGCAGTCAT | 58 | 45 | 3429 |
| 502332 | 39823 | 39842 | TCTGACAGGTCTATGCTGCA | 46 | 50 | 3430 |
| 502333 | 39828 | 39847 | ACTCTTCTGACAGGTCTATG | 47 | 50 | 3431 |
| 502334 | 39833 | 39852 | TTTCCACTCTTCTGACAGGT | 54 | 72 | 3432 |
| 502335 | 39906 | 39925 | ATTCTTTAGAATCCTCTAAA | 0 | 10 | 3433 |
| 502336 | 39911 | 39930 | AGGTAATTCTTTAGAATCCT | 41 | 62 | 3434 |
| 502337 | 39965 | 39984 | AAGGGCCCATGTGCTCCTGG | 14 | 33 | 3435 |
| 502338 | 39970 | 39989 | CTGCCAAGGGCCCATGTGCT | 10 | 30 | 3436 |
| 502339 | 39975 | 39994 | GTCCACTGCCAAGGGCCCAT | 37 | 51 | 3437 |
| 502340 | 39980 | 39999 | CTCAAGTCCACTGCCAAGGG | 0 | 9 | 3438 |
| 502341 | 39985 | 40004 | GGCCCCTCAAGTCCACTGCC | 0 | 14 | 3439 |
| 502342 | 39990 | 40009 | GCTTTGGCCCCTCAAGTCCA | 13 | 27 | 3440 |
| 502343 | 40041 | 40060 | TAAAAGTACAAGGCAGGACA | 26 | 25 | 3441 |
| 502344 | 40063 | 40082 | TCCCTGTTGCTTTGTCTCTA | 20 | 26 | 3442 |
| 502345 | 40068 | 40087 | CTGCCTCCCTGTTGCTTTGT | 24 | 31 | 3443 |
| 502346 | 40073 | 40092 | TCCTGCTGCCTCCCTGTTGC | 0 | 21 | 3444 |
| 502347 | 40078 | 40097 | AATGTTCCTGCTGCCTCCCT | 0 | 0 | 3445 |
| 502348 | 40083 | 40102 | ATGGAAATGTTCCTGCTGCC | 33 | 33 | 3446 |
| 502349 | 40088 | 40107 | TGTGCATGGAAATGTTCCTG | 39 | 38 | 3447 |
| 502350 | 40093 | 40112 | ACACCTGTGCATGGAAATGT | 7 | 24 | 3448 |
| 502351 | 40098 | 40117 | CAGCCACACCTGTGCATGGA | 56 | 54 | 3449 |
| 502352 | 40103 | 40122 | CTCCCCAGCCACACCTGTGC | 10 | 21 | 3450 |
| 502353 | 40108 | 40127 | AGCCCCTCCCCAGCCACACC | 2 | 0 | 3451 |
| 502354 | 40130 | 40149 | CTTCACATTGCCCACAGGAC | 39 | 41 | 3452 |
| 502355 | 40135 | 40154 | AATTCCTTCACATTGCCCAC | 14 | 19 | 3453 |
| 502356 | 40140 | 40159 | GAGCAAATTCCTTCACATTG | 0 | 0 | 3454 |
| 502357 | 40145 | 40164 | GTGAAGAGCAAATTCCTTCA | 0 | 13 | 3455 |
| 502358 | 40150 | 40169 | TCAAGGTGAAGAGCAAATTC | 0 | 7 | 3456 |
| 502359 | 40155 | 40174 | CATTCTCAAGGTGAAGAGCA | 32 | 20 | 3457 |
| 502360 | 40160 | 40179 | CTCTCCATTCTCAAGGTGAA | 0 | 0 | 3458 |
| 502361 | 40182 | 40201 | CCTCCCAAACACTCTCTGGT | 11 | 11 | 3459 |
| 502362 | 40187 | 40206 | CTTCCCCTCCCAAACACTCT | 2 | 15 | 3460 |

TABLE 50
Inhibition of DGAT2 mRNA by 5-10-5 MOE
gapmers targeting SEQ ID NO: 2

| | SEQ ID | SEQ ID | | | |
|---|---|---|---|---|---|
| | NO: 2 | NO: 2 | | % | SEQ |
| ISIS | Start | Stop | | inhi- | ID |
| NO | Site | Site | Sequence | bition | NO |
| 507659 | 26616 | 26635 | AGTCCTGATGATCCCCTACC | 44 | 3384 |
| 507660 | 26617 | 26636 | AAGTCCTGATGATCCCCTAC | 54 | 3385 |
| 507661 | 26618 | 26637 | TAAGTCCTGATGATCCCCTA | 53 | 3386 |
| 507662 | 26619 | 26638 | GTAAGTCCTGATGATCCCCT | 59 | 3387 |
| 507663 | 26621 | 26640 | TGGTAAGTCCTGATGATCCC | 73 | 3388 |
| 507664 | 26622 | 26641 | ATGGTAAGTCCTGATGATCC | 49 | 3389 |
| 507665 | 26623 | 26642 | CATGGTAAGTCCTGATGATC | 68 | 3390 |
| 507666 | 26624 | 26643 | ACATGGTAAGTCCTGATGAT | 35 | 3391 |
| 495752 | 26631 | 26650 | AGCACTGACATGGTAAGTCC | 67 | 3392 |
| 495753 | 26632 | 26651 | CAGCACTGACATGGTAAGTC | 75 | 3393 |
| 495754 | 26633 | 26652 | TCAGCACTGACATGGTAAGT | 50 | 3394 |
| 495755 | 26634 | 26653 | CTCAGCACTGACATGGTAAG | 35 | 3395 |
| 507667 | 26636 | 26655 | TGCTCAGCACTGACATGGTA | 60 | 3396 |
| 507668 | 26637 | 26656 | CTGCTCAGCACTGACATGGT | 56 | 3397 |
| 507669 | 26638 | 26657 | GCTGCTCAGCACTGACATGG | 69 | 3398 |
| 507670 | 26639 | 26658 | AGCTGCTCAGCACTGACATG | 54 | 3399 |
| 507671 | 26712 | 26731 | TGTGAAGTTCTATCCCTTGG | 52 | 3400 |
| 507672 | 26713 | 26732 | CTGTGAAGTTCTATCCCTTG | 40 | 3401 |
| 507673 | 26714 | 26733 | CCTGTGAAGTTCTATCCCTT | 28 | 3402 |
| 507674 | 26715 | 26734 | ACCTGTGAAGTTCTATCCCT | 27 | 3403 |
| 495756 | 26779 | 26798 | CTGCCATTTAATGAGCTTCA | 80 | 3404 |
| 495757 | 26780 | 26799 | TCTGCCATTTAATGAGCTTC | 56 | 3405 |
| 495758 | 26781 | 26800 | CTCTGCCATTTAATGAGCTT | 22 | 3406 |
| 495759 | 26782 | 26801 | ACTCTGCCATTTAATGAGCT | 13 | 3407 |
| 507675 | 26812 | 26831 | GGAATGCACTGAGTTTCTGC | 64 | 3408 |
| 507676 | 26813 | 26832 | GGGAATGCACTGAGTTTCTG | 39 | 3409 |
| 507677 | 26850 | 26869 | TCACTAATTCTGGGCTTCCA | 66 | 3410 |
| 507678 | 26851 | 26870 | TTCACTAATTCTGGGCTTCC | 51 | 3411 |
| 507679 | 26852 | 26871 | GTTCACTAATTCTGGGCTTC | 70 | 3412 |
| 507680 | 26853 | 26872 | AGTTCACTAATTCTGGGCTT | 37 | 3413 |
| 507681 | 26880 | 26899 | AAGGTGAAGACTGGCTGTTT | 4 | 3414 |
| 507682 | 26881 | 26900 | AAAGGTGAAGACTGGCTGTT | 43 | 3415 |
| 507683 | 26882 | 26901 | TAAAGGTGAAGACTGGCTGT | 46 | 3416 |
| 507684 | 26883 | 26902 | CTAAAGGTGAAGACTGGCTG | 70 | 3417 |
| 507685 | 26885 | 26904 | GCCTAAAGGTGAAGACTGGC | 42 | 3418 |
| 507686 | 26886 | 26905 | GGCCTAAAGGTGAAGACTGG | 18 | 3419 |
| 507687 | 26887 | 26906 | GGGCCTAAAGGTGAAGACTG | 31 | 3420 |
| 507688 | 26888 | 26907 | TGGGCCTAAAGGTGAAGACT | 37 | 3421 |
| 507689 | 27047 | 27066 | AGTTCTTCCAACCAGTGTTT | 66 | 3422 |
| 507690 | 27048 | 27067 | CAGTTCTTCCAACCAGTGTT | 69 | 3423 |
| 507691 | 27049 | 27068 | TCAGTTCTTCCAACCAGTGT | 63 | 3424 |
| 507692 | 27050 | 27069 | CTCAGTTCTTCCAACCAGTG | 83 | 3425 |
| 507693 | 27052 | 27071 | TGCTCAGTTCTTCCAACCAG | 79 | 3426 |
| 507694 | 27053 | 27072 | TTGCTCAGTTCTTCCAACCA | 80 | 3427 |
| 507695 | 27054 | 27073 | TTTGCTCAGTTCTTCCAACC | 78 | 3428 |
| 507696 | 27055 | 27074 | GTTTGCTCAGTTCTTCCAAC | 85 | 3429 |
| 507697 | 27057 | 27076 | TAGTTTGCTCAGTTCTTCCA | 30 | 3430 |
| 507698 | 27058 | 27077 | TTAGTTTGCTCAGTTCTTCC | 55 | 3431 |
| 507699 | 27059 | 27078 | TTTAGTTTGCTCAGTTCTTC | 27 | 3432 |
| 507700 | 27060 | 27079 | GTTTAGTTTGCTCAGTTCTT | 48 | 3433 |
| 507701 | 27217 | 27236 | GTACTTTCTTCTCATGTGAC | 9 | 3434 |
| 507702 | 27218 | 27237 | AGTACTTTCTTCTCATGTGA | 0 | 3435 |
| 507703 | 27219 | 27238 | CAGTACTTTCTTCTCATGTG | 0 | 3436 |
| 507704 | 27220 | 27239 | CCAGTACTTTCTTCTCATGT | 53 | 3437 |
| 507705 | 27222 | 27241 | TCCCAGTACTTTCTTCTCAT | 67 | 3438 |
| 507706 | 27223 | 27242 | GTCCCAGTACTTTCTTCTCA | 57 | 3439 |
| 507707 | 27224 | 27243 | GGTCCCAGTACTTTCTTCTC | 58 | 3440 |
| 507708 | 27225 | 27244 | TGGTCCCAGTACTTTCTTCT | 49 | 3441 |
| 507709 | 27227 | 27246 | CCTGGTCCCAGTACTTTCTT | 65 | 3442 |
| 507710 | 27228 | 27247 | TCCTGGTCCCAGTACTTTCT | 77 | 3443 |
| 507711 | 27229 | 27248 | GTCCTGGTCCCAGTACTTTC | 69 | 3444 |
| 507712 | 27230 | 27249 | TGTCCTGGTCCCAGTACTTT | 64 | 3445 |
| 507713 | 27232 | 27251 | CTTGTCCTGGTCCCAGTACT | 61 | 3446 |
| 507714 | 27233 | 27252 | TCTTGTCCTGGTCCCAGTAC | 61 | 3447 |
| 507715 | 27234 | 27253 | TTCTTGTCCTGGTCCCAGTA | 67 | 3448 |
| 507716 | 27235 | 27254 | GTTCTTGTCCTGGTCCCAGT | 76 | 3449 |
| 507717 | 27237 | 27256 | GGGTTCTTGTCCTGGTCCCA | 80 | 3450 |
| 507718 | 27238 | 27257 | TGGGTTCTTGTCCTGGTCCC | 71 | 3451 |
| 507719 | 27239 | 27258 | CTGGGTTCTTGTCCTGGTCC | 62 | 3452 |
| 507720 | 27240 | 27259 | CCTGGGTTCTTGTCCTGGTC | 55 | 3453 |
| 413433 | 32431 | 32450 | GCCTGGACAAGTCCTGCCCA | 69 | 425 |
| 507721 | 35662 | 35681 | AAAAATATACATGCTCTTTT | 0 | 3461 |
| 507722 | 35663 | 35682 | CAAAAATATACATGCTCTTT | 29 | 3462 |
| 507723 | 35664 | 35683 | TCAAAAATATACATGCTCTT | 45 | 3463 |
| 507724 | 35665 | 35684 | CTCAAAAATATACATGCTCT | 74 | 3464 |
| 507725 | 35667 | 35686 | TACTCAAAAATATACATGCT | 51 | 3465 |
| 507726 | 35668 | 35687 | CTACTCAAAAATATACATGC | 63 | 3466 |
| 507727 | 35669 | 35688 | TCTACTCAAAAATATACATG | 0 | 3467 |

TABLE 51
Inhibition of DGAT2 mRNA by 5-10-5 MOE
gapmers targeting SEQ ID NO: 2

| | SEQ ID | SEQ ID | | | |
|---|---|---|---|---|---|
| | NO: 2 | NO: 2 | | % | SEQ |
| ISIS | Start | Stop | | inhi- | ID |
| NO | Site | Site | Sequence | bition | NO |
| 522363 | 12807 | 12826 | CCAGCACTAATTTTTACAAC | 72 | 3468 |
| 522364 | 12808 | 12827 | TCCAGCACTAATTTTTACAA | 49 | 3469 |
| 522365 | 12809 | 12828 | ATCCAGCACTAATTTTTACA | 65 | 3470 |
| 522366 | 13442 | 13461 | GTGGCTCTCTAGATAGGGTG | 80 | 3471 |
| 522367 | 14193 | 14212 | CTCAGCCTTGGAGCCAGCTC | 59 | 3472 |
| 522368 | 14194 | 14213 | ACTCAGCCTTGGAGCCAGCT | 72 | 3473 |
| 522369 | 14195 | 14214 | CACTCAGCCTTGGAGCCAGC | 63 | 3474 |
| 522370 | 14196 | 14215 | CCACTCAGCCTTGGAGCCAG | 71 | 3475 |
| 522371 | 14198 | 14217 | TGCCACTCAGCCTTGGAGCC | 67 | 3476 |
| 522372 | 14199 | 14218 | TTGCCACTCAGCCTTGGAGC | 62 | 3477 |
| 522373 | 15319 | 15338 | GGAGTTTGTGTTTCCCATTT | 83 | 3478 |
| 522374 | 15321 | 15340 | AAGGAGTTTGTGTTTCCCAT | 83 | 3479 |
| 522375 | 15322 | 15341 | AAAGGAGTTTGTGTTTCCCA | 83 | 3480 |
| 522376 | 15324 | 15343 | GAAAAGGAGTTTGTGTTTCC | 50 | 3481 |
| 522377 | 15325 | 15344 | AGAAAAGGAGTTTGTGTTTC | 17 | 3482 |
| 522378 | 15326 | 15345 | AAGAAAAGGAGTTTGTGTTT | 30 | 3483 |
| 522379 | 15327 | 15346 | TAAGAAAAGGAGTTTGTGTT | 21 | 3484 |
| 522380 | 15569 | 15588 | ATTTTCACAAGGAGAAGCTG | 40 | 3485 |
| 522381 | 15570 | 15589 | CATTTTCACAAGGAGAAGCT | 44 | 3486 |
| 522382 | 15571 | 15590 | CCATTTTCACAAGGAGAAGC | 32 | 3487 |
| 522383 | 15574 | 15593 | GCACCATTTTCACAAGGAGA | 84 | 3488 |
| 522384 | 15575 | 15594 | TGCACCATTTTCACAAGGAG | 77 | 3489 |
| 522385 | 15576 | 15595 | GTGCACCATTTTCACAAGGA | 72 | 3490 |
| 522386 | 15577 | 15596 | AGTGCACCATTTTCACAAGG | 65 | 3491 |
| 522387 | 15647 | 15666 | CATCACAATATATGGGCAAG | 44 | 3492 |
| 522388 | 15648 | 15667 | CCATCACAATATATGGGCAA | 51 | 3493 |
| 522389 | 15649 | 15668 | CCCATCACAATATATGGGCA | 60 | 3494 |
| 522390 | 15650 | 15669 | CCCCATCACAATATATGGGC | 55 | 3495 |
| 522391 | 15877 | 15896 | AGGTAAGGCCAAGGAAGTGA | 69 | 3496 |
| 522392 | 15878 | 15897 | GAGGTAAGGCCAAGGAAGTG | 50 | 3497 |
| 522393 | 15879 | 15898 | AGAGGTAAGGCCAAGGAAGT | 43 | 3498 |
| 522394 | 15880 | 15899 | AAGAGGTAAGGCCAAGGAAG | 57 | 3499 |
| 522395 | 15934 | 15953 | CACCTGGGTTTTTGTGTATT | 66 | 3500 |
| 522396 | 15935 | 15954 | ACACCTGGGTTTTTGTGTAT | 61 | 3501 |
| 522397 | 15936 | 15955 | TACACCTGGGTTTTTGTGTA | 37 | 3502 |
| 522398 | 15937 | 15956 | ATACACCTGGGTTTTTGTGT | 69 | 3503 |
| 522399 | 16047 | 16066 | TCTGAGTGCTGCTAACTTGG | 77 | 3504 |
| 522400 | 16048 | 16067 | ATCTGAGTGCTGCTAACTTG | 65 | 3505 |
| 522401 | 16049 | 16068 | AATCTGAGTGCTGCTAACTT | 62 | 3506 |
| 522402 | 16050 | 16069 | AAATCTGAGTGCTGCTAACT | 60 | 3507 |
| 522403 | 16052 | 16071 | TGAAATCTGAGTGCTGCTAA | 68 | 3508 |
| 522404 | 16053 | 16072 | TTGAAATCTGAGTGCTGCTA | 74 | 3509 |
| 522405 | 16054 | 16073 | GTTGAAATCTGAGTGCTGCT | 78 | 3510 |
| 522406 | 16083 | 16102 | GCACTAAATTAGGAAGCTGG | 77 | 3511 |
| 522407 | 16084 | 16103 | AGCACTAAATTAGGAAGCTG | 65 | 3512 |
| 522408 | 16289 | 16308 | CTGGGACATCTGGCCCAAAG | 72 | 3513 |
| 522409 | 16290 | 16309 | ACTGGGACATCTGGCCCAAA | 71 | 3514 |
| 522410 | 16291 | 16310 | CACTGGGACATCTGGCCCAA | 66 | 3515 |
| 522411 | 16292 | 16311 | CCACTGGGACATCTGGCCCA | 71 | 3516 |
| 522412 | 16294 | 16313 | GCCCACTGGGACATCTGGCC | 61 | 3517 |
| 522413 | 16295 | 16314 | GGCCCACTGGGACATCTGGC | 68 | 3518 |
| 522414 | 16306 | 16325 | CCTTAAAGCAGGGCCCACTG | 50 | 3519 |
| 522415 | 16307 | 16326 | TCCTTAAAGCAGGGCCCACT | 58 | 3520 |
| 522416 | 16308 | 16327 | ATCCTTAAAGCAGGGCCCAC | 67 | 3521 |
| 522417 | 16309 | 16328 | TATCCTTAAAGCAGGGCCCA | 63 | 3522 |
| 522418 | 16429 | 16448 | CACTGGTGCCTAAGAGCCCT | 70 | 3523 |
| 522419 | 16430 | 16449 | CCACTGGTGCCTAAGAGCCC | 63 | 3524 |
| 522420 | 16431 | 16450 | TCCACTGGTGCCTAAGAGCC | 61 | 3525 |
| 522421 | 16432 | 16451 | CTCCACTGGTGCCTAAGAGC | 73 | 3526 |
| 522422 | 16809 | 16828 | GAGGCTGAGTTCTGCTCCTG | 77 | 3527 |
| 522423 | 16810 | 16829 | AGAGGCTGAGTTCTGCTCCT | 59 | 3528 |
| 522424 | 16811 | 16830 | TAGAGGCTGAGTTCTGCTCC | 71 | 3529 |
| 522425 | 16812 | 16831 | CTAGAGGCTGAGTTCTGCTC | 60 | 3530 |
| 522426 | 16814 | 16833 | TGCTAGAGGCTGAGTTCTGC | 65 | 3531 |
| 522427 | 16815 | 16834 | CTGCTAGAGGCTGAGTTCTG | 71 | 3532 |
| 522428 | 16816 | 16835 | TCTGCTAGAGGCTGAGTTCT | 74 | 3533 |
| 522429 | 16817 | 16836 | ATCTGCTAGAGGCTGAGTTC | 67 | 3534 |
| 522430 | 16824 | 16843 | CTTGGGCATCTGCTAGAGGC | 69 | 3535 |
| 522431 | 16825 | 16844 | TCTTGGGCATCTGCTAGAGG | 66 | 3536 |
| 522432 | 16826 | 16845 | TTCTTGGGCATCTGCTAGAG | 65 | 3537 |
| 522433 | 16827 | 16846 | CTTCTTGGGCATCTGCTAGA | 62 | 3538 |
| 522434 | 16829 | 16848 | TGCTTCTTGGGCATCTGCTA | 71 | 3539 |
| 522435 | 16830 | 16849 | CTGCTTCTTGGGCATCTGCT | 81 | 3540 |
| 522436 | 16831 | 16850 | TCTGCTTCTTGGGCATCTGC | 80 | 3541 |
| 522437 | 16832 | 16851 | CTCTGCTTCTTGGGCATCTG | 82 | 3542 |
| 522438 | 16834 | 16853 | TCCTCTGCTTCTTGGGCATC | 67 | 3543 |
| 522439 | 16835 | 16854 | CTCCTCTGCTTCTTGGGCAT | 68 | 3544 |
| 413433 | 32431 | 32450 | GCCTGGACAAGTCCTGCCCA | 82 | 425 |

TABLE 52
Inhibition of DGAT2 mRNA by 5-10-5 MOE
gapmers targeting SEQ ID NO: 2

| | SEQ ID | SEQ ID | | | |
|---|---|---|---|---|---|
| | NO: 2 | NO: 2 | | % | SEQ |
| ISIS | Start | Stop | | inhi- | ID |
| NO | Site | Site | Sequence | bition | NO |
| 522440 | 16836 | 16855 | TCTCCTCTGCTTCTTGGGCA | 78 | 3545 |
| 522441 | 16897 | 16916 | CTTTCTAAGTACCCTTTACA | 37 | 3546 |
| 522442 | 16898 | 16917 | GCTTTCTAAGTACCCTTTAC | 71 | 3547 |
| 522443 | 16899 | 16918 | TGCTTTCTAAGTACCCTTTA | 62 | 3548 |
| 522444 | 16900 | 16919 | GTGCTTTCTAAGTACCCTTT | 85 | 3549 |
| 522445 | 16902 | 16921 | CAGTGCTTTCTAAGTACCCT | 86 | 3550 |
| 522446 | 17008 | 17027 | AGGGAAAGGTCTTCTCCAGC | 74 | 3551 |
| 522447 | 17009 | 17028 | GAGGGAAAGGTCTTCTCCAG | 67 | 3552 |
| 522448 | 17010 | 17029 | GGAGGGAAAGGTCTTCTCCA | 62 | 3553 |
| 522449 | 17011 | 17030 | AGGAGGGAAAGGTCTTCTCC | 60 | 3554 |
| 522450 | 17208 | 17227 | GTCTCATTCATCTGGGCCCT | 80 | 3555 |
| 522451 | 17209 | 17228 | TGTCTCATTCATCTGGGCCC | 65 | 3556 |
| 522452 | 17210 | 17229 | ATGTCTCATTCATCTGGGCC | 72 | 3557 |
| 522453 | 17270 | 17289 | CCCCTGTACTCAGCCCTTTC | 49 | 3558 |
| 522454 | 17271 | 17290 | ACCCCTGTACTCAGCCCTTT | 60 | 3559 |
| 522455 | 17272 | 17291 | CACCCCTGTACTCAGCCCTT | 51 | 3560 |
| 522456 | 17273 | 17292 | TCACCCCTGTACTCAGCCCT | 61 | 3561 |
| 522457 | 17275 | 17294 | TCTCACCCCTGTACTCAGCC | 70 | 3562 |
| 522458 | 17276 | 17295 | ATCTCACCCCTGTACTCAGC | 58 | 3563 |
| 522459 | 17277 | 17296 | CATCTCACCCCTGTACTCAG | 51 | 3564 |
| 522460 | 17278 | 17297 | CCATCTCACCCCTGTACTCA | 54 | 3565 |
| 522461 | 17329 | 17348 | AAGTCTTCCTTCTCCTCCAC | 65 | 3566 |
| 522462 | 17330 | 17349 | AAAGTCTTCCTTCTCCTCCA | 71 | 3567 |
| 522463 | 17331 | 17350 | GAAAGTCTTCCTTCTCCTCC | 75 | 3568 |
| 522464 | 17332 | 17351 | GGAAAGTCTTCCTTCTCCTC | 75 | 3569 |
| 522465 | 17451 | 17470 | CAGGTAGAGTTCTATTGCTT | 80 | 3570 |
| 522466 | 17452 | 17471 | CCAGGTAGAGTTCTATTGCT | 77 | 3571 |
| 522467 | 19361 | 19380 | GGCTACTGGCATTGCTCCTC | 74 | 3572 |
| 522468 | 19362 | 19381 | TGGCTACTGGCATTGCTCCT | 56 | 3573 |
| 522469 | 19363 | 19382 | GTGGCTACTGGCATTGCTCC | 68 | 3574 |
| 522470 | 19364 | 19383 | GGTGGCTACTGGCATTGCTC | 74 | 3575 |
| 522471 | 19909 | 19928 | ACATGCCTGAGGGCAGCAGT | 68 | 3576 |
| 522472 | 19910 | 19929 | CACATGCCTGAGGGCAGCAG | 69 | 3577 |
| 522473 | 19911 | 19930 | TCACATGCCTGAGGGCAGCA | 81 | 3578 |
| 522474 | 19912 | 19931 | CTCACATGCCTGAGGGCAGC | 79 | 3579 |
| 522475 | 19984 | 20003 | AATATCTGATATCAAAGTGA | 14 | 3580 |
| 522476 | 19985 | 20004 | CAATATCTGATATCAAAGTG | 14 | 3581 |
| 522477 | 19986 | 20005 | CCAATATCTGATATCAAAGT | 41 | 3582 |
| 522478 | 19987 | 20006 | CCCAATATCTGATATCAAAG | 74 | 3583 |
| 522479 | 19989 | 20008 | TGCCCAATATCTGATATCAA | 73 | 3584 |
| 522480 | 19990 | 20009 | TTGCCCAATATCTGATATCA | 65 | 3585 |
| 522481 | 20297 | 20316 | TTGCTTGAGGTCAGGGTGTG | 62 | 3586 |
| 522482 | 20298 | 20317 | CTTGCTTGAGGTCAGGGTGT | 72 | 3587 |
| 522483 | 20299 | 20318 | ACTTGCTTGAGGTCAGGGTG | 68 | 3588 |
| 522484 | 20300 | 20319 | CACTTGCTTGAGGTCAGGGT | 84 | 3589 |
| 522485 | 20302 | 20321 | ATCACTTGCTTGAGGTCAGG | 82 | 3590 |
| 522486 | 20303 | 20322 | AATCACTTGCTTGAGGTCAG | 77 | 3591 |
| 522487 | 20304 | 20323 | AAATCACTTGCTTGAGGTCA | 75 | 3592 |
| 522488 | 20305 | 20324 | AAAATCACTTGCTTGAGGTC | 71 | 3593 |
| 522489 | 20669 | 20688 | GGTACAAGTTTCTCCACCTA | 75 | 3594 |
| 522490 | 20670 | 20689 | AGGTACAAGTTTCTCCACCT | 74 | 3595 |
| 522491 | 20671 | 20690 | TAGGTACAAGTTTCTCCACC | 47 | 3596 |
| 522492 | 20672 | 20691 | CTAGGTACAAGTTTCTCCAC | 72 | 3597 |
| 522493 | 20828 | 20847 | ATAGCTGAGCAAATCCATAA | 63 | 3598 |
| 522494 | 20829 | 20848 | CATAGCTGAGCAAATCCATA | 73 | 3599 |
| 522495 | 20830 | 20849 | GCATAGCTGAGCAAATCCAT | 80 | 3600 |
| 522496 | 20831 | 20850 | TGCATAGCTGAGCAAATCCA | 72 | 3601 |
| 522497 | 20833 | 20852 | ACTGCATAGCTGAGCAAATC | 63 | 3602 |
| 522498 | 20834 | 20853 | TACTGCATAGCTGAGCAAAT | 67 | 3603 |
| 522499 | 20835 | 20854 | TTACTGCATAGCTGAGCAAA | 65 | 3604 |
| 522500 | 20836 | 20855 | TTTACTGCATAGCTGAGCAA | 65 | 3605 |
| 522501 | 20838 | 20857 | GGTTTACTGCATAGCTGAGC | 85 | 3606 |
| 522502 | 20839 | 20858 | AGGTTTACTGCATAGCTGAG | 65 | 3607 |
| 522503 | 20840 | 20859 | GAGGTTTACTGCATAGCTGA | 72 | 3608 |
| 522504 | 20841 | 20860 | AGAGGTTTACTGCATAGCTG | 75 | 3609 |
| 522505 | 20843 | 20862 | ATAGAGGTTTACTGCATAGC | 71 | 3610 |
| 522506 | 20844 | 20863 | CATAGAGGTTTACTGCATAG | 65 | 3611 |
| 522507 | 20956 | 20975 | ACTCTCTCTGCACACTCCCA | 62 | 3612 |
| 522508 | 20957 | 20976 | CACTCTCTCTGCACACTCCC | 61 | 3613 |
| 522509 | 20958 | 20977 | GCACTCTCTCTGCACACTCC | 80 | 3614 |
| 522510 | 20959 | 20978 | TGCACTCTCTCTGCACACTC | 76 | 3615 |
| 522511 | 21934 | 21953 | TGCTGATTACAAGCTGATTC | 64 | 3616 |
| 522512 | 21935 | 21954 | CTGCTGATTACAAGCTGATT | 67 | 3617 |
| 522513 | 21936 | 21955 | ACTGCTGATTACAAGCTGAT | 61 | 3618 |
| 522514 | 21937 | 21956 | AACTGCTGATTACAAGCTGA | 55 | 3619 |
| 522515 | 22152 | 22171 | TGGTGATAAGGCAGCAGTCT | 53 | 3620 |
| 522516 | 22153 | 22172 | ATGGTGATAAGGCAGCAGTC | 62 | 3621 |
| 413433 | 32431 | 32450 | GCCTGGACAAGTCCTGCCCA | 81 | 425 |

TABLE 53
Inhibition of DGAT2 mRNA by 5-10-5 MOE
gapmers targeting SEQ ID NO: 2

| | SEQ ID | SEQ ID | | | |
|---|---|---|---|---|---|
| | NO: 2 | NO: 2 | | % | SEQ |
| ISIS | Start | Stop | | inhi- | ID |
| NO | Site | Site | Sequence | bition | NO |
| 522517 | 22154 | 22173 | GATGGTGATAAGGCAGCAGT | 67 | 3622 |
| 522518 | 22155 | 22174 | AGATGGTGATAAGGCAGCAG | 71 | 3623 |
| 522519 | 22157 | 22176 | AGAGATGGTGATAAGGCAGC | 58 | 3624 |
| 522520 | 22158 | 22177 | CAGAGATGGTGATAAGGCAG | 38 | 3625 |
| 522521 | 22159 | 22178 | CCAGAGATGGTGATAAGGCA | 60 | 3626 |
| 522522 | 22160 | 22179 | CCCAGAGATGGTGATAAGGC | 67 | 3627 |
| 522523 | 23856 | 23875 | AGACTTGCCCAGCAACCCAT | 49 | 3628 |
| 522524 | 23857 | 23876 | CAGACTTGCCCAGCAACCCA | 58 | 3629 |
| 522525 | 23858 | 23877 | CCAGACTTGCCCAGCAACCC | 61 | 3630 |
| 522526 | 23859 | 23878 | TCCAGACTTGCCCAGCAACC | 57 | 3631 |
| 522527 | 24120 | 24139 | AAACCTAGGTTCAGACTTTG | 51 | 3632 |
| 522528 | 24121 | 24140 | CAAACCTAGGTTCAGACTTT | 48 | 3633 |
| 522529 | 24123 | 24142 | GTCAAACCTAGGTTCAGACT | 84 | 3634 |
| 522530 | 24125 | 24144 | GAGTCAAACCTAGGTTCAGA | 66 | 3635 |
| 522531 | 24126 | 24145 | AGAGTCAAACCTAGGTTCAG | 48 | 3636 |
| 522532 | 24127 | 24146 | AAGAGTCAAACCTAGGTTCA | 50 | 3637 |
| 522533 | 24128 | 24147 | GAAGAGTCAAACCTAGGTTC | 61 | 3638 |
| 522534 | 25019 | 25038 | GAGCATCCCCAATCCCTGCT | 72 | 3639 |
| 522535 | 25020 | 25039 | TGAGCATCCCCAATCCCTGC | 63 | 3640 |
| 522536 | 25021 | 25040 | TTGAGCATCCCCAATCCCTG | 56 | 3641 |
| 522537 | 25022 | 25041 | TTTGAGCATCCCCAATCCCT | 48 | 3642 |
| 522538 | 25024 | 25043 | ACTTTGAGCATCCCCAATCC | 42 | 3643 |
| 522539 | 25025 | 25044 | TACTTTGAGCATCCCCAATC | 53 | 3644 |
| 522540 | 25026 | 25045 | GTACTTTGAGCATCCCCAAT | 70 | 3645 |
| 522541 | 25027 | 25046 | TGTACTTTGAGCATCCCCAA | 68 | 3646 |
| 522542 | 25029 | 25048 | AGTGTACTTTGAGCATCCCC | 77 | 3647 |
| 522543 | 25030 | 25049 | AAGTGTACTTTGAGCATCCC | 70 | 3648 |
| 522544 | 25031 | 25050 | CAAGTGTACTTTGAGCATCC | 73 | 3649 |
| 522545 | 25032 | 25051 | CCAAGTGTACTTTGAGCATC | 76 | 3650 |
| 522546 | 25034 | 25053 | CTCCAAGTGTACTTTGAGCA | 82 | 3651 |
| 522547 | 25070 | 25089 | CAGAGGTTCAACATCCAATT | 74 | 3652 |
| 522548 | 25071 | 25090 | ACAGAGGTTCAACATCCAAT | 74 | 3653 |
| 522549 | 25072 | 25091 | GACAGAGGTTCAACATCCAA | 73 | 3654 |
| 522550 | 25073 | 25092 | GGACAGAGGTTCAACATCCA | 82 | 3655 |
| 522551 | 25076 | 25095 | CAAGGACAGAGGTTCAACAT | 53 | 3656 |
| 522552 | 25077 | 25096 | CCAAGGACAGAGGTTCAACA | 72 | 3657 |
| 522553 | 25078 | 25097 | GCCAAGGACAGAGGTTCAAC | 84 | 3658 |
| 522554 | 25079 | 25098 | GGCCAAGGACAGAGGTTCAA | 82 | 3659 |
| 522555 | 25081 | 25100 | GAGGCCAAGGACAGAGGTTC | 80 | 3660 |
| 522556 | 25082 | 25101 | TGAGGCCAAGGACAGAGGTT | 82 | 3661 |
| 522557 | 25083 | 25102 | GTGAGGCCAAGGACAGAGGT | 67 | 3662 |
| 522558 | 25084 | 25103 | TGTGAGGCCAAGGACAGAGG | 63 | 3663 |
| 522559 | 25086 | 25105 | TCTGTGAGGCCAAGGACAGA | 54 | 3664 |
| 522560 | 25087 | 25106 | GTCTGTGAGGCCAAGGACAG | 58 | 3665 |
| 522561 | 25088 | 25107 | TGTCTGTGAGGCCAAGGACA | 71 | 3666 |
| 522562 | 25089 | 25108 | CTGTCTGTGAGGCCAAGGAC | 74 | 3667 |
| 522563 | 25184 | 25203 | AGTCTCTCATAATTGCCAGT | 69 | 3668 |
| 522564 | 25185 | 25204 | AAGTCTCTCATAATTGCCAG | 69 | 3669 |
| 522565 | 25186 | 25205 | GAAGTCTCTCATAATTGCCA | 71 | 3670 |
| 522566 | 25187 | 25206 | GGAAGTCTCTCATAATTGCC | 46 | 3671 |
| 522567 | 25189 | 25208 | TGGGAAGTCTCTCATAATTG | 37 | 3672 |
| 522568 | 25190 | 25209 | TTGGGAAGTCTCTCATAATT | 22 | 3673 |
| 522569 | 25191 | 25210 | CTTGGGAAGTCTCTCATAAT | 23 | 3674 |
| 522570 | 25192 | 25211 | CCTTGGGAAGTCTCTCATAA | 35 | 3675 |
| 522571 | 25194 | 25213 | GGCCTTGGGAAGTCTCTCAT | 51 | 3676 |
| 522572 | 25195 | 25214 | AGGCCTTGGGAAGTCTCTCA | 55 | 3677 |
| 522573 | 25196 | 25215 | TAGGCCTTGGGAAGTCTCTC | 61 | 3678 |
| 522574 | 25197 | 25216 | CTAGGCCTTGGGAAGTCTCT | 43 | 3679 |
| 522575 | 25242 | 25261 | CATTTTGGAGACCACATGAA | 31 | 3680 |
| 522576 | 25243 | 25262 | TCATTTTGGAGACCACATGA | 41 | 3681 |
| 522577 | 25244 | 25263 | GTCATTTTGGAGACCACATG | 60 | 3682 |
| 522578 | 25245 | 25264 | GGTCATTTTGGAGACCACAT | 70 | 3683 |
| 522579 | 25268 | 25287 | AATGGGAATGGTATCGCACT | 84 | 3684 |
| 522580 | 25269 | 25288 | CAATGGGAATGGTATCGCAC | 87 | 3685 |
| 522581 | 25270 | 25289 | ACAATGGGAATGGTATCGCA | 85 | 3686 |
| 522582 | 25271 | 25290 | CACAATGGGAATGGTATCGC | 86 | 3687 |
| 522583 | 25377 | 25396 | AGCTATAGAATCAGACAGAC | 53 | 3688 |
| 522584 | 25378 | 25397 | CAGCTATAGAATCAGACAGA | 56 | 3689 |
| 522585 | 25379 | 25398 | TCAGCTATAGAATCAGACAG | 48 | 3690 |
| 522586 | 25381 | 25400 | CATCAGCTATAGAATCAGAC | 64 | 3691 |
| 522587 | 25783 | 25802 | GCACTTGATCTGGGACCCAA | 87 | 3692 |
| 522588 | 25784 | 25803 | AGCACTTGATCTGGGACCCA | 88 | 3693 |
| 522589 | 25785 | 25804 | GAGCACTTGATCTGGGACCC | 86 | 3694 |
| 522590 | 25786 | 25805 | AGAGCACTTGATCTGGGACC | 76 | 3695 |
| 522591 | 25788 | 25807 | GTAGAGCACTTGATCTGGGA | 74 | 3696 |
| 522592 | 25789 | 25808 | GGTAGAGCACTTGATCTGGG | 79 | 3697 |
| 522593 | 25790 | 25809 | GGGTAGAGCACTTGATCTGG | 61 | 3698 |
| 413433 | 32431 | 32450 | GCCTGGACAAGTCCTGCCCA | 84 | 425 |

TABLE 54
Inhibition of DGAT2 mRNA by 5-10-5 MOE
gapmers targeting SEQ ID NO: 2

| | SEQ ID | SEQ ID | | | |
|---|---|---|---|---|---|
| | NO: 2 | NO: 2 | | % | SEQ |
| ISIS | Start | Stop | | inhi- | ID |
| NO | Site | Site | Sequence | bition | NO |
| 522594 | 25842 | 25861 | AACTATCACACCACCTCCCA | 44 | 3699 |
| 522595 | 25843 | 25862 | GAACTATCACACCACCTCCC | 42 | 3700 |
| 522596 | 25844 | 25863 | GGAACTATCACACCACCTCC | 47 | 3701 |
| 522597 | 25845 | 25864 | GGGAACTATCACACCACCTC | 61 | 3702 |
| 522598 | 25847 | 25866 | ATGGGAACTATCACACCACC | 64 | 3703 |
| 522599 | 25848 | 25867 | AATGGGAACTATCACACCAC | 33 | 3704 |
| 522600 | 25849 | 25868 | AAATGGGAACTATCACACCA | 37 | 3705 |
| 522601 | 25850 | 25869 | TAAATGGGAACTATCACACC | 16 | 3706 |
| 522602 | 25901 | 25920 | TGACCTTGGGCAAGTTACCT | 74 | 3707 |
| 522603 | 25902 | 25921 | GTGACCTTGGGCAAGTTACC | 76 | 3708 |
| 522604 | 25903 | 25922 | TGTGACCTTGGGCAAGTTAC | 77 | 3709 |
| 522605 | 25904 | 25923 | GTGTGACCTTGGGCAAGTTA | 78 | 3710 |
| 522606 | 25906 | 25925 | CTGTGTGACCTTGGGCAAGT | 80 | 3711 |
| 522607 | 25907 | 25926 | TCTGTGTGACCTTGGGCAAG | 81 | 3712 |
| 522608 | 25908 | 25927 | ATCTGTGTGACCTTGGGCAA | 81 | 3713 |
| 522609 | 25909 | 25928 | AATCTGTGTGACCTTGGGCA | 87 | 3714 |
| 522610 | 25911 | 25930 | CAAATCTGTGTGACCTTGGG | 85 | 3715 |
| 522611 | 25912 | 25931 | TCAAATCTGTGTGACCTTGG | 69 | 3716 |
| 522612 | 25913 | 25932 | TTCAAATCTGTGTGACCTTG | 75 | 3717 |
| 522613 | 25914 | 25933 | ATTCAAATCTGTGTGACCTT | 79 | 3718 |
| 522614 | 25916 | 25935 | GGATTCAAATCTGTGTGACC | 75 | 3719 |
| 522615 | 25917 | 25936 | GGGATTCAAATCTGTGTGAC | 54 | 3720 |
| 522616 | 25918 | 25937 | AGGGATTCAAATCTGTGTGA | 57 | 3721 |
| 522617 | 25919 | 25938 | CAGGGATTCAAATCTGTGTG | 63 | 3722 |
| 522618 | 25951 | 25970 | GGGAAAGGCACAGGCTTTGG | 81 | 3723 |
| 522619 | 25952 | 25971 | TGGGAAAGGCACAGGCTTTG | 70 | 3724 |
| 522620 | 25954 | 25973 | TGTGGGAAAGGCACAGGCTT | 66 | 3725 |
| 522621 | 26006 | 26025 | AGGCAAAGTAACATACCTGC | 87 | 3726 |
| 522622 | 26007 | 26026 | AAGGCAAAGTAACATACCTG | 76 | 3727 |
| 522623 | 26008 | 26027 | TAAGGCAAAGTAACATACCT | 62 | 3728 |
| 522624 | 26009 | 26028 | TTAAGGCAAAGTAACATACC | 69 | 3729 |
| 522625 | 26011 | 26030 | CCTTAAGGCAAAGTAACATA | 73 | 3730 |
| 522626 | 26012 | 26031 | ACCTTAAGGCAAAGTAACAT | 45 | 3731 |
| 522627 | 26166 | 26185 | ATTTCTTATCTTCAATCCTC | 84 | 3732 |
| 522628 | 26167 | 26186 | CATTTCTTATCTTCAATCCT | 64 | 3733 |
| 522629 | 26168 | 26187 | TCATTTCTTATCTTCAATCC | 62 | 3734 |
| 522630 | 26169 | 26188 | CTCATTTCTTATCTTCAATC | 81 | 3735 |
| 522631 | 26171 | 26190 | CTCTCATTTCTTATCTTCAA | 86 | 3736 |
| 522632 | 26172 | 26191 | GCTCTCATTTCTTATCTTCA | 90 | 3737 |
| 522633 | 26173 | 26192 | TGCTCTCATTTCTTATCTTC | 78 | 3738 |
| 522634 | 26174 | 26193 | GTGCTCTCATTTCTTATCTT | 80 | 3739 |
| 522635 | 26176 | 26195 | AGGTGCTCTCATTTCTTATC | 78 | 3740 |
| 522636 | 26177 | 26196 | CAGGTGCTCTCATTTCTTAT | 73 | 3741 |
| 522637 | 26178 | 26197 | CCAGGTGCTCTCATTTCTTA | 74 | 3742 |
| 522638 | 26179 | 26198 | GCCAGGTGCTCTCATTTCTT | 84 | 3743 |
| 522639 | 26201 | 26220 | GCCCATCATGACCAGGCCCT | 60 | 3744 |
| 522640 | 26202 | 26221 | GGCCCATCATGACCAGGCCC | 21 | 3745 |
| 522641 | 26203 | 26222 | GGGCCCATCATGACCAGGCC | 41 | 3746 |
| 522642 | 26301 | 26320 | CAGGCCTCGGGAAGCACCTG | 71 | 3747 |
| 522643 | 26302 | 26321 | GCAGGCCTCGGGAAGCACCT | 86 | 3748 |
| 522644 | 26303 | 26322 | AGCAGGCCTCGGGAAGCACC | 77 | 3749 |
| 522645 | 26304 | 26323 | GAGCAGGCCTCGGGAAGCAC | 80 | 3750 |
| 522646 | 26354 | 26373 | CAGAAAAAGCAACCAAAGCA | 31 | 3751 |
| 522647 | 26355 | 26374 | GCAGAAAAAGCAACCAAAGC | 31 | 3752 |
| 522648 | 26356 | 26375 | TGCAGAAAAAGCAACCAAAG | 34 | 3753 |
| 522649 | 26357 | 26376 | CTGCAGAAAAAGCAACCAAA | 52 | 3754 |
| 522650 | 26359 | 26378 | ACCTGCAGAAAAAGCAACCA | 32 | 3755 |
| 522651 | 26360 | 26379 | GACCTGCAGAAAAAGCAACC | 24 | 3756 |
| 522652 | 26361 | 26380 | AGACCTGCAGAAAAAGCAAC | 17 | 3757 |
| 522653 | 26362 | 26381 | CAGACCTGCAGAAAAAGCAA | 23 | 3758 |
| 522654 | 26386 | 26405 | ACCTAAGGAGTGAGGGTATC | 46 | 3759 |
| 522655 | 26387 | 26406 | AACCTAAGGAGTGAGGGTAT | 58 | 3760 |
| 522656 | 26388 | 26407 | CAACCTAAGGAGTGAGGGTA | 59 | 3761 |
| 522657 | 26389 | 26408 | GCAACCTAAGGAGTGAGGGT | 73 | 3762 |
| 522658 | 27639 | 27658 | TGCTTGCCAGGTGAGCTTCT | 76 | 3763 |
| 522659 | 27640 | 27659 | TTGCTTGCCAGGTGAGCTTC | 65 | 3764 |
| 522660 | 27641 | 27660 | TTTGCTTGCCAGGTGAGCTT | 65 | 3765 |
| 522661 | 27642 | 27661 | CTTTGCTTGCCAGGTGAGCT | 77 | 3766 |
| 522662 | 27644 | 27663 | GTCTTTGCTTGCCAGGTGAG | 74 | 3767 |
| 522663 | 27645 | 27664 | GGTCTTTGCTTGCCAGGTGA | 75 | 3768 |
| 522664 | 27767 | 27786 | CCTTGTATTAAATACTCTAA | 59 | 3769 |
| 522665 | 27768 | 27787 | ACCTTGTATTAAATACTCTA | 57 | 3770 |
| 522666 | 27769 | 27788 | CACCTTGTATTAAATACTCT | 78 | 3771 |
| 522667 | 27770 | 27789 | GCACCTTGTATTAAATACTC | 83 | 3772 |
| 522668 | 27772 | 27791 | ATGCACCTTGTATTAAATAC | 69 | 3773 |
| 522669 | 27773 | 27792 | AATGCACCTTGTATTAAATA | 41 | 3774 |
| 522670 | 27774 | 27793 | CAATGCACCTTGTATTAAAT | 59 | 3775 |
| 413433 | 32431 | 32450 | GCCTGGACAAGTCCTGCCCA | 83 | 425 |

TABLE 55
Inhibition of DGAT2 mRNA by 5-10-5 MOE
gapmers targeting SEQ ID NO: 2

| | SEQ ID | SEQ ID | | | |
|---|---|---|---|---|---|
| | NO: 2 | NO: 2 | | % | SEQ |
| ISIS | Start | Stop | | inhi- | ID |
| NO | Site | Site | Sequence | bition | NO |
| 522671 | 27775 | 27794 | CCAATGCACCTTGTATTAAA | 83 | 3776 |
| 522672 | 27777 | 27796 | ATCCAATGCACCTTGTATTA | 85 | 3777 |
| 522673 | 27778 | 27797 | AATCCAATGCACCTTGTATT | 77 | 3778 |
| 522674 | 27779 | 27798 | AAATCCAATGCACCTTGTAT | 80 | 3779 |
| 522675 | 27780 | 27799 | GAAATCCAATGCACCTTGTA | 85 | 3780 |
| 522676 | 27782 | 27801 | TTGAAATCCAATGCACCTTG | 86 | 3781 |
| 522677 | 27783 | 27802 | TTTGAAATCCAATGCACCTT | 87 | 3782 |
| 522678 | 27784 | 27803 | CTTTGAAATCCAATGCACCT | 82 | 3783 |
| 522679 | 27785 | 27804 | CCTTTGAAATCCAATGCACC | 88 | 3784 |
| 522680 | 27787 | 27806 | TTCCTTTGAAATCCAATGCA | 82 | 3785 |
| 522681 | 27788 | 27807 | TTTCCTTTGAAATCCAATGC | 82 | 3786 |
| 522682 | 27789 | 27808 | GTTTCCTTTGAAATCCAATG | 87 | 3787 |
| 522683 | 27790 | 27809 | AGTTTCCTTTGAAATCCAAT | 82 | 3788 |
| 522684 | 27850 | 27869 | CTGTTACTACATGTCTAATC | 61 | 3789 |
| 522685 | 27851 | 27870 | CCTGTTACTACATGTCTAAT | 51 | 3790 |
| 522686 | 27852 | 27871 | ACCTGTTACTACATGTCTAA | 68 | 3791 |
| 522687 | 27853 | 27872 | CACCTGTTACTACATGTCTA | 82 | 3792 |
| 522688 | 27855 | 27874 | GGCACCTGTTACTACATGTC | 90 | 3793 |
| 522689 | 27856 | 27875 | AGGCACCTGTTACTACATGT | 88 | 3794 |
| 522690 | 27857 | 27876 | AAGGCACCTGTTACTACATG | 82 | 3795 |
| 522691 | 27858 | 27877 | AAAGGCACCTGTTACTACAT | 80 | 3796 |
| 522692 | 28027 | 28046 | ATCACAGAATTATCAGCAGT | 84 | 3797 |
| 522693 | 28028 | 28047 | AATCACAGAATTATCAGCAG | 79 | 3798 |
| 522694 | 28029 | 28048 | AAATCACAGAATTATCAGCA | 86 | 3799 |
| 522695 | 28030 | 28049 | TAAATCACAGAATTATCAGC | 64 | 3800 |
| 522696 | 28128 | 28147 | CACACAATATCCATGGACTT | 80 | 3801 |
| 522697 | 28129 | 28148 | ACACACAATATCCATGGACT | 88 | 3802 |
| 522698 | 28130 | 28149 | GACACACAATATCCATGGAC | 89 | 3803 |
| 522699 | 28131 | 28150 | TGACACACAATATCCATGGA | 75 | 3804 |
| 522700 | 28133 | 28152 | CCTGACACACAATATCCATG | 80 | 3805 |
| 522701 | 28134 | 28153 | GCCTGACACACAATATCCAT | 79 | 3806 |
| 522702 | 28135 | 28154 | AGCCTGACACACAATATCCA | 72 | 3807 |
| 522703 | 28460 | 28479 | CATGAGAAGCTTAGAAGGCC | 59 | 3808 |
| 522704 | 28462 | 28481 | CTCATGAGAAGCTTAGAAGG | 63 | 3809 |
| 522705 | 28463 | 28482 | GCTCATGAGAAGCTTAGAAG | 83 | 3810 |
| 522706 | 28465 | 28484 | GAGCTCATGAGAAGCTTAGA | 70 | 3811 |
| 522707 | 28466 | 28485 | TGAGCTCATGAGAAGCTTAG | 60 | 3812 |
| 522708 | 28467 | 28486 | CTGAGCTCATGAGAAGCTTA | 69 | 3813 |
| 522709 | 28468 | 28487 | GCTGAGCTCATGAGAAGCTT | 80 | 3814 |
| 522710 | 28470 | 28489 | TTGCTGAGCTCATGAGAAGC | 74 | 3815 |
| 522711 | 28471 | 28490 | GTTGCTGAGCTCATGAGAAG | 66 | 3816 |
| 522712 | 28472 | 28491 | TGTTGCTGAGCTCATGAGAA | 60 | 3817 |
| 522713 | 28473 | 28492 | CTGTTGCTGAGCTCATGAGA | 65 | 3818 |
| 522714 | 28475 | 28494 | CACTGTTGCTGAGCTCATGA | 73 | 3819 |
| 522715 | 28476 | 28495 | CCACTGTTGCTGAGCTCATG | 86 | 3820 |
| 522716 | 28477 | 28496 | ACCACTGTTGCTGAGCTCAT | 86 | 3821 |
| 522717 | 28478 | 28497 | AACCACTGTTGCTGAGCTCA | 87 | 3822 |
| 522718 | 28480 | 28499 | AAAACCACTGTTGCTGAGCT | 80 | 3823 |
| 522719 | 28481 | 28500 | AAAAACCACTGTTGCTGAGC | 83 | 3824 |
| 522720 | 28482 | 28501 | TAAAAACCACTGTTGCTGAG | 69 | 3825 |
| 522721 | 28483 | 28502 | GTAAAAACCACTGTTGCTGA | 69 | 3826 |
| 522722 | 28516 | 28535 | TCTGGTTCCATGCTCTTAGG | 70 | 3827 |
| 522723 | 28517 | 28536 | CTCTGGTTCCATGCTCTTAG | 74 | 3828 |
| 522724 | 28518 | 28537 | GCTCTGGTTCCATGCTCTTA | 78 | 3829 |
| 522725 | 28519 | 28538 | GGCTCTGGTTCCATGCTCTT | 75 | 3830 |
| 522726 | 28521 | 28540 | CAGGCTCTGGTTCCATGCTC | 73 | 3831 |
| 522727 | 28522 | 28541 | ACAGGCTCTGGTTCCATGCT | 78 | 3832 |
| 522728 | 28523 | 28542 | AACAGGCTCTGGTTCCATGC | 78 | 3833 |
| 522729 | 28581 | 28600 | TGAACTAAATCCACCAAATG | 22 | 3834 |
| 522730 | 28582 | 28601 | ATGAACTAAATCCACCAAAT | 46 | 3835 |
| 522731 | 28583 | 28602 | GATGAACTAAATCCACCAAA | 46 | 3836 |
| 522732 | 28584 | 28603 | GGATGAACTAAATCCACCAA | 67 | 3837 |
| 522733 | 28586 | 28605 | AAGGATGAACTAAATCCACC | 65 | 3838 |
| 522734 | 28587 | 28606 | AAAGGATGAACTAAATCCAC | 43 | 3839 |
| 522735 | 28588 | 28607 | AAAAGGATGAACTAAATCCA | 33 | 3840 |
| 522736 | 28589 | 28608 | CAAAAGGATGAACTAAATCC | 16 | 3841 |
| 522737 | 28803 | 28822 | AGAGACTGAATTCTAGCCTG | 59 | 3842 |
| 522738 | 28804 | 28823 | CAGAGACTGAATTCTAGCCT | 67 | 3843 |
| 522739 | 28805 | 28824 | CCAGAGACTGAATTCTAGCC | 67 | 3844 |
| 522740 | 28806 | 28825 | TCCAGAGACTGAATTCTAGC | 77 | 3845 |
| 522741 | 28808 | 28827 | TATCCAGAGACTGAATTCTA | 52 | 3846 |
| 522742 | 28809 | 28828 | GTATCCAGAGACTGAATTCT | 46 | 3847 |
| 522743 | 28810 | 28829 | GGTATCCAGAGACTGAATTC | 50 | 3848 |
| 522744 | 28811 | 28830 | GGGTATCCAGAGACTGAATT | 65 | 3849 |
| 522745 | 29011 | 29030 | GTTTAGGCTATGGTCTGAGC | 90 | 3850 |
| 522746 | 29012 | 29031 | GGTTTAGGCTATGGTCTGAG | 78 | 3851 |
| 522747 | 29013 | 29032 | AGGTTTAGGCTATGGTCTGA | 71 | 3852 |
| 413433 | 32431 | 32450 | GCCTGGACAAGTCCTGCCCA | 84 | 425 |

TABLE 56
Inhibition of DGAT2 mRNA by 5-10-5 MOE
gapmers targeting SEQ ID NO: 2

| | SEQ | SEQ | | | |
|---|---|---|---|---|---|
| | ID | ID | | | |
| | NO: | NO: | | | |
| | 2 | 2 | | % | SEQ |
| ISIS | Start | Stop | | inhi- | ID |
| NO | Site | Site | Sequence | bition | NO |
| 522748 | 29014 | 29033 | GAGGTTTAGGCTATGGTCTG | 71 | 3853 |
| 522749 | 29016 | 29035 | ATGAGGTTTAGGCTATGGTC | 67 | 3854 |
| 522750 | 29045 | 29064 | GGATGCTCCAGGTGGGCCAG | 59 | 3855 |
| 522751 | 29046 | 29065 | TGGATGCTCCAGGTGGGCCA | 52 | 3856 |
| 522752 | 29047 | 29066 | GTGGATGCTCCAGGTGGGCC | 57 | 3857 |
| 522753 | 29048 | 29067 | GGTGGATGCTCCAGGTGGGC | 52 | 3858 |
| 522754 | 29140 | 29159 | GTCTGCCTGATTCCCTTTCT | 75 | 3859 |
| 522755 | 29141 | 29160 | AGTCTGCCTGATTCCCTTTC | 58 | 3860 |
| 522756 | 29142 | 29161 | CAGTCTGCCTGATTCCCTTT | 59 | 3861 |
| 522757 | 29143 | 29162 | GCAGTCTGCCTGATTCCCTT | 85 | 3862 |
| 522758 | 29145 | 29164 | CAGCAGTCTGCCTGATTCCC | 79 | 3863 |
| 522759 | 29146 | 29165 | TCAGCAGTCTGCCTGATTCC | 72 | 3864 |
| 522760 | 29147 | 29166 | TTCAGCAGTCTGCCTGATTC | 61 | 3865 |
| 522761 | 29148 | 29167 | GTTCAGCAGTCTGCCTGATT | 71 | 3866 |
| 522762 | 29150 | 29169 | CTGTTCAGCAGTCTGCCTGA | 55 | 3867 |
| 522763 | 29151 | 29170 | ACTGTTCAGCAGTCTGCCTG | 62 | 3868 |
| 522764 | 29152 | 29171 | TACTGTTCAGCAGTCTGCCT | 64 | 3869 |
| 522765 | 29153 | 29172 | TTACTGTTCAGCAGTCTGCC | 61 | 3870 |
| 522766 | 29155 | 29174 | ACTTACTGTTCAGCAGTCTG | 73 | 3871 |
| 522767 | 29156 | 29175 | TACTTACTGTTCAGCAGTCT | 75 | 3872 |
| 522768 | 29157 | 29176 | ATACTTACTGTTCAGCAGTC | 74 | 3873 |
| 522769 | 29158 | 29177 | CATACTTACTGTTCAGCAGT | 74 | 3874 |
| 522770 | 29160 | 29179 | GTCATACTTACTGTTCAGCA | 89 | 3875 |
| 522771 | 29161 | 29180 | AGTCATACTTACTGTTCAGC | 74 | 3876 |
| 522772 | 29162 | 29181 | AAGTCATACTTACTGTTCAG | 39 | 3877 |
| 522773 | 29163 | 29182 | AAAGTCATACTTACTGTTCA | 43 | 3878 |
| 522774 | 29194 | 29213 | TGGTGAATAGCTATGTCTAA | 54 | 3879 |
| 522775 | 29195 | 29214 | TTGGTGAATAGCTATGTCTA | 58 | 3880 |
| 522776 | 29196 | 29215 | CTTGGTGAATAGCTATGTCT | 71 | 3881 |
| 522777 | 29197 | 29216 | GCTTGGTGAATAGCTATGTC | 77 | 3882 |
| 522778 | 29199 | 29218 | TAGCTTGGTGAATAGCTATG | 70 | 3883 |
| 522779 | 29200 | 29219 | GTAGCTTGGTGAATAGCTAT | 50 | 3884 |
| 522780 | 29201 | 29220 | GGTAGCTTGGTGAATAGCTA | 71 | 3885 |
| 522781 | 29243 | 29262 | AGCCTACAAGAGCCTGTTAA | 39 | 3886 |
| 522782 | 29244 | 29263 | CAGCCTACAAGAGCCTGTTA | 67 | 3887 |
| 522783 | 29245 | 29264 | GCAGCCTACAAGAGCCTGTT | 82 | 3888 |
| 522784 | 29246 | 29265 | TGCAGCCTACAAGAGCCTGT | 82 | 3889 |
| 522785 | 29248 | 29267 | TGTGCAGCCTACAAGAGCCT | 64 | 3890 |
| 522786 | 29249 | 29268 | ATGTGCAGCCTACAAGAGCC | 59 | 3891 |
| 522787 | 29250 | 29269 | CATGTGCAGCCTACAAGAGC | 39 | 3892 |
| 522788 | 29251 | 29270 | GCATGTGCAGCCTACAAGAG | 64 | 3893 |
| 522789 | 29253 | 29272 | AAGCATGTGCAGCCTACAAG | 70 | 3894 |
| 522790 | 29254 | 29273 | GAAGCATGTGCAGCCTACAA | 66 | 3895 |
| 522791 | 29255 | 29274 | GGAAGCATGTGCAGCCTACA | 78 | 3896 |
| 522792 | 29256 | 29275 | GGGAAGCATGTGCAGCCTAC | 69 | 3897 |
| 522793 | 29258 | 29277 | TAGGGAAGCATGTGCAGCCT | 74 | 3898 |
| 522794 | 29259 | 29278 | CTAGGGAAGCATGTGCAGCC | 72 | 3899 |
| 522795 | 29260 | 29279 | TCTAGGGAAGCATGTGCAGC | 65 | 3900 |
| 522796 | 29261 | 29280 | TTCTAGGGAAGCATGTGCAG | 61 | 3901 |
| 522797 | 29263 | 29282 | GTTTCTAGGGAAGCATGTGC | 72 | 3902 |
| 522798 | 29264 | 29283 | AGTTTCTAGGGAAGCATGTG | 40 | 3903 |
| 522799 | 29265 | 29284 | AAGTTTCTAGGGAAGCATGT | 46 | 3904 |
| 522800 | 29266 | 29285 | CAAGTTTCTAGGGAAGCATG | 42 | 3905 |
| 522801 | 29362 | 29381 | TACAACTCTCTTGTTGGGAG | 70 | 3906 |
| 522802 | 29363 | 29382 | GTACAACTCTCTTGTTGGGA | 73 | 3907 |
| 522803 | 29364 | 29383 | GGTACAACTCTCTTGTTGGG | 63 | 3908 |
| 522804 | 29365 | 29384 | GGGTACAACTCTCTTGTTGG | 57 | 3909 |
| 522805 | 29367 | 29386 | CAGGGTACAACTCTCTTGTT | 64 | 3910 |
| 522806 | 29368 | 29387 | ACAGGGTACAACTCTCTTGT | 57 | 3911 |
| 522807 | 29369 | 29388 | AACAGGGTACAACTCTCTTG | 85 | 3912 |
| 522808 | 29370 | 29389 | AAACAGGGTACAACTCTCTT | 63 | 3913 |
| 522809 | 29372 | 29391 | AAAAACAGGGTACAACTCTC | 62 | 3914 |
| 522810 | 29373 | 29392 | TAAAAACAGGGTACAACTCT | 32 | 3915 |
| 522811 | 29374 | 29393 | CTAAAAACAGGGTACAACTC | 21 | 3916 |
| 522812 | 29375 | 29394 | GCTAAAAACAGGGTACAACT | 31 | 3917 |
| 522813 | 29476 | 29495 | TGTAGACTCTCCATGAGCCT | 65 | 3918 |
| 522814 | 29477 | 29496 | ATGTAGACTCTCCATGAGCC | 45 | 3919 |
| 522815 | 29478 | 29497 | GATGTAGACTCTCCATGAGC | 25 | 3920 |
| 522816 | 29479 | 29498 | GGATGTAGACTCTCCATGAG | 42 | 3921 |
| 522817 | 30968 | 30987 | TAAGCTAGGCACACCCAGGG | 43 | 3922 |
| 522818 | 30969 | 30988 | CTAAGCTAGGCACACCCAGG | 23 | 3923 |
| 522819 | 30970 | 30989 | ACTAAGCTAGGCACACCCAG | 33 | 3924 |
| 522820 | 30971 | 30990 | CACTAAGCTAGGCACACCCA | 48 | 3925 |
| 522821 | 30973 | 30992 | GGCACTAAGCTAGGCACACC | 78 | 3926 |
| 522822 | 30975 | 30994 | GTGGCACTAAGCTAGGCACA | 69 | 3927 |
| 522823 | 30976 | 30995 | TGTGGCACTAAGCTAGGCAC | 66 | 3928 |
| 522824 | 30978 | 30997 | ACTGTGGCACTAAGCTAGGC | 69 | 3929 |
| 413433 | 32431 | 32450 | GCCTGGACAAGTCCTGCCCA | 85 | 425 |

TABLE 57
Inhibition of DGAT2 mRNA by 5-10-5 MOE
gapmers targeting SEQ ID NO: 2

| | SEQ | SEQ | | | |
|---|---|---|---|---|---|
| | ID | ID | | | |
| | NO: | NO: | | | |
| | 2 | 2 | | % | SEQ |
| ISIS | Start | Stop | | inhi- | ID |
| NO | Site | Site | Sequence | bition | NO |
| 522825 | 30979 | 30998 | TACTGTGGCACTAAGCTAGG | 53 | 3930 |
| 522826 | 30980 | 30999 | TTACTGTGGCACTAAGCTAG | 36 | 3931 |
| 522827 | 30981 | 31000 | TTTACTGTGGCACTAAGCTA | 40 | 3932 |
| 522828 | 30983 | 31002 | TGTTTACTGTGGCACTAAGC | 59 | 3933 |
| 522829 | 30984 | 31003 | GTGTTTACTGTGGCACTAAG | 68 | 3934 |
| 522830 | 30985 | 31004 | AGTGTTTACTGTGGCACTAA | 67 | 3935 |
| 522831 | 30986 | 31005 | GAGTGTTTACTGTGGCACTA | 72 | 3936 |
| 522832 | 31770 | 31789 | ATGGATACTCAGAAGAGCAG | 34 | 3937 |
| 522833 | 31771 | 31790 | GATGGATACTCAGAAGAGCA | 46 | 3938 |
| 522834 | 31793 | 31812 | ACCTCAGGGCTGGCCCAAAG | 47 | 3939 |
| 522835 | 31794 | 31813 | GACCTCAGGGCTGGCCCAAA | 67 | 3940 |
| 522836 | 31795 | 31814 | GGACCTCAGGGCTGGCCCAA | 66 | 3941 |
| 522837 | 31796 | 31815 | AGGACCTCAGGGCTGGCCCA | 68 | 3942 |
| 522838 | 31798 | 31817 | TCAGGACCTCAGGGCTGGCC | 78 | 3943 |
| 522839 | 31799 | 31818 | GTCAGGACCTCAGGGCTGGC | 66 | 3944 |
| 522840 | 31800 | 31819 | TGTCAGGACCTCAGGGCTGG | 53 | 3945 |
| 522841 | 31801 | 31820 | CTGTCAGGACCTCAGGGCTG | 49 | 3946 |
| 522842 | 31933 | 31952 | GAGTTATCCTCAATTCACCA | 74 | 3947 |
| 522843 | 31934 | 31953 | AGAGTTATCCTCAATTCACC | 59 | 3948 |
| 522844 | 31936 | 31955 | CCAGAGTTATCCTCAATTCA | 71 | 3949 |
| 522845 | 31938 | 31957 | TGCCAGAGTTATCCTCAATT | 52 | 3950 |
| 522846 | 31939 | 31958 | CTGCCAGAGTTATCCTCAAT | 62 | 3951 |
| 522847 | 31940 | 31959 | CCTGCCAGAGTTATCCTCAA | 64 | 3952 |
| 522848 | 31941 | 31960 | TCCTGCCAGAGTTATCCTCA | 68 | 3953 |
| 522849 | 31943 | 31962 | GATCCTGCCAGAGTTATCCT | 69 | 3954 |
| 522850 | 31944 | 31963 | GGATCCTGCCAGAGTTATCC | 62 | 3955 |
| 522851 | 31945 | 31964 | AGGATCCTGCCAGAGTTATC | 45 | 3956 |
| 522852 | 31946 | 31965 | CAGGATCCTGCCAGAGTTAT | 60 | 3957 |
| 522853 | 32116 | 32135 | CAGCAAATATACACCACCCT | 70 | 3958 |
| 522854 | 32117 | 32136 | ACAGCAAATATACACCACCC | 66 | 3959 |
| 522855 | 32118 | 32137 | AACAGCAAATATACACCACC | 56 | 3960 |
| 522856 | 32119 | 32138 | CAACAGCAAATATACACCAC | 66 | 3961 |
| 522857 | 32121 | 32140 | CACAACAGCAAATATACACC | 70 | 3962 |
| 522858 | 32122 | 32141 | TCACAACAGCAAATATACAC | 55 | 3963 |
| 522859 | 32123 | 32142 | CTCACAACAGCAAATATACA | 41 | 3964 |
| 522860 | 32124 | 32143 | ACTCACAACAGCAAATATAC | 48 | 3965 |
| 522861 | 32126 | 32145 | TGACTCACAACAGCAAATAT | 21 | 3966 |
| 522862 | 32127 | 32146 | CTGACTCACAACAGCAAATA | 33 | 3967 |
| 522863 | 32128 | 32147 | ACTGACTCACAACAGCAAAT | 44 | 3968 |
| 522864 | 32129 | 32148 | CACTGACTCACAACAGCAAA | 54 | 3969 |
| 522865 | 32131 | 32150 | GTCACTGACTCACAACAGCA | 85 | 3970 |
| 522866 | 32132 | 32151 | AGTCACTGACTCACAACAGC | 80 | 3971 |
| 522867 | 32133 | 32152 | CAGTCACTGACTCACAACAG | 62 | 3972 |
| 522868 | 32134 | 32153 | TCAGTCACTGACTCACAACA | 62 | 3973 |
| 522869 | 32136 | 32155 | TCTCAGTCACTGACTCACAA | 71 | 3974 |
| 522870 | 32137 | 32156 | ATCTCAGTCACTGACTCACA | 77 | 3975 |
| 522871 | 32138 | 32157 | GATCTCAGTCACTGACTCAC | 75 | 3976 |
| 522872 | 32139 | 32158 | GGATCTCAGTCACTGACTCA | 73 | 3977 |
| 522873 | 32173 | 32192 | GGTTACCCAGCCACTGCCCC | 65 | 3978 |
| 522874 | 32174 | 32193 | GGGTTACCCAGCCACTGCCC | 54 | 3979 |
| 522875 | 32175 | 32194 | AGGGTTACCCAGCCACTGCC | 61 | 3980 |
| 522876 | 32176 | 32195 | CAGGGTTACCCAGCCACTGC | 65 | 3981 |
| 522877 | 32178 | 32197 | TGCAGGGTTACCCAGCCACT | 74 | 3982 |
| 522878 | 32179 | 32198 | ATGCAGGGTTACCCAGCCAC | 73 | 3983 |
| 522879 | 32180 | 32199 | GATGCAGGGTTACCCAGCCA | 67 | 3984 |
| 522880 | 32181 | 32200 | GGATGCAGGGTTACCCAGCC | 69 | 3985 |
| 522881 | 32183 | 32202 | AAGGATGCAGGGTTACCCAG | 58 | 3986 |
| 522882 | 32184 | 32203 | GAAGGATGCAGGGTTACCCA | 58 | 3987 |
| 522883 | 32185 | 32204 | TGAAGGATGCAGGGTTACCC | 51 | 3988 |
| 522884 | 32186 | 32205 | GTGAAGGATGCAGGGTTACC | 43 | 3989 |
| 413433 | 32431 | 32450 | GCCTGGACAAGTCCTGCCCA | 80 | 425 |
| 522885 | 33409 | 33428 | ATCTTCATTACATGATTACT | 59 | 3990 |
| 522886 | 33410 | 33429 | GATCTTCATTACATGATTAC | 58 | 3991 |
| 522887 | 33411 | 33430 | AGATCTTCATTACATGATTA | 69 | 3992 |
| 522888 | 33412 | 33431 | CAGATCTTCATTACATGATT | 81 | 3993 |
| 522889 | 33414 | 33433 | GGCAGATCTTCATTACATGA | 83 | 3994 |
| 522890 | 33669 | 33688 | ATGGACAGGTGATTCTAAGC | 69 | 3995 |
| 522891 | 33670 | 33689 | GATGGACAGGTGATTCTAAG | 56 | 3996 |
| 522892 | 33672 | 33691 | CAGATGGACAGGTGATTCTA | 62 | 3997 |
| 522893 | 33674 | 33693 | GGCAGATGGACAGGTGATTC | 67 | 3998 |
| 522894 | 33675 | 33694 | AGGCAGATGGACAGGTGATT | 76 | 3999 |
| 522895 | 33676 | 33695 | GAGGCAGATGGACAGGTGAT | 69 | 4000 |
| 522896 | 33677 | 33696 | TGAGGCAGATGGACAGGTGA | 50 | 4001 |
| 522897 | 33730 | 33749 | GTGACCTTGGGATAGTCCCT | 88 | 4002 |
| 522898 | 33731 | 33750 | TGTGACCTTGGGATAGTCCC | 76 | 4003 |
| 522899 | 33732 | 33751 | TTGTGACCTTGGGATAGTCC | 69 | 4004 |
| 522900 | 33733 | 33752 | TTTGTGACCTTGGGATAGTC | 52 | 4005 |
| 522901 | 33857 | 33876 | GAGCAAAGGCTTGCTTAAGT | 60 | 4006 |

TABLE 58
Inhibition of DGAT2 mRNA by 5-10-5 MOE
gapmers targeting SEQ ID NO: 2

| | SEQ | SEQ | | | |
|---|---|---|---|---|---|
| | ID | ID | | | |
| | NO: | NO: | | | |
| | 2 | 2 | | % | SEQ |
| ISIS | Start | Stop | | inhi- | ID |
| NO | Site | Site | Sequence | bition | NO |
| 413433 | 32431 | 32450 | GCCTGGACAAGTCCTGCCCA | 77 | 425 |
| 522902 | 33858 | 33877 | AGAGCAAAGGCTTGCTTAAG | 40 | 4007 |
| 522903 | 33859 | 33878 | AAGAGCAAAGGCTTGCTTAA | 41 | 4008 |
| 522904 | 33860 | 33879 | GAAGAGCAAAGGCTTGCTTA | 67 | 4009 |
| 522905 | 33862 | 33881 | CAGAAGAGCAAAGGCTTGCT | 74 | 4010 |
| 522906 | 33863 | 33882 | ACAGAAGAGCAAAGGCTTGC | 61 | 4011 |
| 522907 | 33864 | 33883 | CACAGAAGAGCAAAGGCTTG | 33 | 4012 |
| 522908 | 33865 | 33884 | CCACAGAAGAGCAAAGGCTT | 58 | 4013 |
| 522909 | 33867 | 33886 | ACCCACAGAAGAGCAAAGGC | 63 | 4014 |
| 522910 | 33868 | 33887 | GACCCACAGAAGAGCAAAGG | 40 | 4015 |
| 522911 | 33869 | 33888 | AGACCCACAGAAGAGCAAAG | 37 | 4016 |
| 522912 | 33870 | 33889 | CAGACCCACAGAAGAGCAAA | 37 | 4017 |
| 522913 | 34212 | 34231 | ATGCCCTTGCTGTAGGACCC | 84 | 4018 |
| 522914 | 34213 | 34232 | AATGCCCTTGCTGTAGGACC | 69 | 4019 |
| 522915 | 34214 | 34233 | CAATGCCCTTGCTGTAGGAC | 59 | 4020 |
| 522916 | 34215 | 34234 | TCAATGCCCTTGCTGTAGGA | 56 | 4021 |
| 522917 | 34740 | 34759 | TTAGCTCTCAGTGAAGCTGG | 76 | 4022 |
| 522918 | 34869 | 34888 | AACAGCAGCAGTCTAATCCA | 49 | 4023 |
| 522919 | 34870 | 34889 | AAACAGCAGCAGTCTAATCC | 50 | 4024 |
| 522920 | 34871 | 34890 | GAAACAGCAGCAGTCTAATC | 30 | 4025 |
| 522921 | 34872 | 34891 | GGAAACAGCAGCAGTCTAAT | 33 | 4026 |
| 522922 | 34899 | 34918 | AACTCTCAGCTACTCCCCAA | 46 | 4027 |
| 522923 | 34900 | 34919 | CAACTCTCAGCTACTCCCCA | 56 | 4028 |
| 522924 | 34901 | 34920 | CCAACTCTCAGCTACTCCCC | 75 | 4029 |
| 522925 | 34902 | 34921 | ACCAACTCTCAGCTACTCCC | 75 | 4030 |
| 522926 | 34932 | 34951 | GCAAACAGATTAAAGTTGCT | 55 | 4031 |
| 522927 | 34933 | 34952 | GGCAAACAGATTAAAGTTGC | 63 | 4032 |
| 522928 | 35274 | 35293 | CACCTGAGTGCTGCAAAGTG | 47 | 4033 |
| 522929 | 35275 | 35294 | CCACCTGAGTGCTGCAAAGT | 55 | 4034 |
| 522930 | 35276 | 35295 | CCCACCTGAGTGCTGCAAAG | 58 | 4035 |
| 522931 | 35277 | 35296 | TCCCACCTGAGTGCTGCAAA | 60 | 4036 |
| 522932 | 35279 | 35298 | ACTCCCACCTGAGTGCTGCA | 77 | 4037 |
| 522933 | 35280 | 35299 | CACTCCCACCTGAGTGCTGC | 62 | 4038 |
| 522934 | 35281 | 35300 | ACACTCCCACCTGAGTGCTG | 64 | 4039 |
| 522935 | 35282 | 35301 | GACACTCCCACCTGAGTGCT | 69 | 4040 |
| 522936 | 35319 | 35338 | TTTTTGGCTGCCCTGCCTCA | 35 | 4041 |
| 522937 | 35320 | 35339 | CTTTTTGGCTGCCCTGCCTC | 56 | 4042 |
| 522938 | 35321 | 35340 | TCTTTTTGGCTGCCCTGCCT | 58 | 4043 |
| 522939 | 35322 | 35341 | GTCTTTTTGGCTGCCCTGCC | 74 | 4044 |
| 522940 | 35324 | 35343 | TGGTCTTTTTGGCTGCCCTG | 72 | 4045 |
| 522941 | 35325 | 35344 | TTGGTCTTTTTGGCTGCCCT | 79 | 4046 |
| 522942 | 35326 | 35345 | GTTGGTCTTTTTGGCTGCCC | 81 | 4047 |
| 522943 | 35327 | 35346 | CGTTGGTCTTTTTGGCTGCC | 79 | 4048 |
| 522944 | 35407 | 35426 | CTTATCTTTGTCCACATATC | 57 | 4049 |
| 522945 | 35408 | 35427 | CCTTATCTTTGTCCACATAT | 66 | 4050 |
| 522946 | 35409 | 35428 | ACCTTATCTTTGTCCACATA | 60 | 4051 |
| 522947 | 35410 | 35429 | TACCTTATCTTTGTCCACAT | 75 | 4052 |
| 522948 | 35412 | 35431 | AATACCTTATCTTTGTCCAC | 67 | 4053 |
| 522949 | 35413 | 35432 | AAATACCTTATCTTTGTCCA | 61 | 4054 |
| 522950 | 35414 | 35433 | TAAATACCTTATCTTTGTCC | 71 | 4055 |
| 522951 | 35415 | 35434 | ATAAATACCTTATCTTTGTC | 16 | 4056 |
| 522952 | 35417 | 35436 | CAATAAATACCTTATCTTTG | 22 | 4057 |
| 522953 | 35418 | 35437 | TCAATAAATACCTTATCTTT | 3 | 4058 |
| 522954 | 35419 | 35438 | TTCAATAAATACCTTATCTT | 12 | 4059 |
| 522955 | 35420 | 35439 | CTTCAATAAATACCTTATCT | 47 | 4060 |
| 522956 | 35422 | 35441 | TGCTTCAATAAATACCTTAT | 65 | 4061 |
| 522957 | 35423 | 35442 | ATGCTTCAATAAATACCTTA | 55 | 4062 |
| 522958 | 35424 | 35443 | AATGCTTCAATAAATACCTT | 42 | 4063 |
| 522959 | 35425 | 35444 | TAATGCTTCAATAAATACCT | 42 | 4064 |
| 522960 | 35432 | 35451 | TTAGAAGTAATGCTTCAATA | 37 | 4065 |
| 522961 | 35433 | 35452 | CTTAGAAGTAATGCTTCAAT | 44 | 4066 |
| 522962 | 35434 | 35453 | TCTTAGAAGTAATGCTTCAA | 44 | 4067 |
| 522963 | 35435 | 35454 | CTCTTAGAAGTAATGCTTCA | 59 | 4068 |
| 522964 | 35437 | 35456 | CCCTCTTAGAAGTAATGCTT | 80 | 4069 |
| 522965 | 35438 | 35457 | TCCCTCTTAGAAGTAATGCT | 73 | 4070 |
| 522966 | 35439 | 35458 | TTCCCTCTTAGAAGTAATGC | 59 | 4071 |
| 522967 | 35440 | 35459 | TTTCCCTCTTAGAAGTAATG | 48 | 4072 |
| 522968 | 37835 | 37854 | GCTAATGATACAAGGTTGTT | 57 | 4073 |
| 522969 | 37836 | 37855 | AGCTAATGATACAAGGTTGT | 54 | 4074 |
| 522970 | 37838 | 37857 | GCAGCTAATGATACAAGGTT | 65 | 4075 |
| 522971 | 37840 | 37859 | ATGCAGCTAATGATACAAGG | 57 | 4076 |
| 522972 | 37841 | 37860 | AATGCAGCTAATGATACAAG | 33 | 4077 |
| 522973 | 37842 | 37861 | AAATGCAGCTAATGATACAA | 24 | 4078 |
| 522974 | 37843 | 37862 | AAAATGCAGCTAATGATACA | 22 | 4079 |
| 522975 | 39666 | 39685 | AAGAGTTACCTCCTCCCTGG | 30 | 4080 |
| 522976 | 39667 | 39686 | CAAGAGTTACCTCCTCCCTG | 36 | 4081 |
| 522977 | 39668 | 39687 | GCAAGAGTTACCTCCTCCCT | 62 | 4082 |
| 522978 | 39669 | 39688 | TGCAAGAGTTACCTCCTCCC | 61 | 4083 |

TABLE 59
Inhibition of DGAT2 mRNA by 3-10-4 MOE
gapmers targeting SEQ ID NO: 2

| | SEQ | SEQ | | | |
|---|---|---|---|---|---|
| | ID | ID | | | |
| | NO: | NO: | | | |
| | 2 | 2 | | % | SEQ |
| ISIS | Start | Stop | | inhi- | ID |
| NO | Site | Site | Sequence | bition | NO |
| 525386 | 10047 | 10063 | CCACAGGGCCCTTTCCA | 49 | 4141 |
| 525387 | 10048 | 10064 | GCCACAGGGCCCTTTCC | 53 | 4142 |
| 525388 | 10215 | 10231 | GTTCTCGAATATCCCTA | 67 | 4143 |
| 525389 | 10216 | 10232 | AGTTCTCGAATATCCCT | 55 | 4144 |
| 525390 | 10217 | 10233 | GAGTTCTCGAATATCCC | 52 | 4145 |
| 525391 | 10218 | 10234 | GGAGTTCTCGAATATCC | 60 | 4146 |
| 525392 | 10219 | 10235 | AGGAGTTCTCGAATATC | 34 | 4147 |
| 525393 | 10220 | 10236 | GAGGAGTTCTCGAATAT | 41 | 4148 |
| 525394 | 10490 | 10506 | GGTCCTCTCCGCTGCCT | 62 | 4149 |
| 525395 | 10491 | 10507 | GGGTCCTCTCCGCTGCC | 70 | 4150 |
| 525396 | 10492 | 10508 | AGGGTCCTCTCCGCTGC | 57 | 4151 |
| 525397 | 10529 | 10545 | TTCACTGAGGACCTCAG | 29 | 4152 |
| 525398 | 10530 | 10546 | ATTCACTGAGGACCTCA | 44 | 4153 |
| 525399 | 10531 | 10547 | GATTCACTGAGGACCTC | 66 | 4154 |
| 525400 | 10532 | 10548 | CGATTCACTGAGGACCT | 48 | 4155 |
| 525401 | 10533 | 10549 | GCGATTCACTGAGGACC | 83 | 4156 |
| 525402 | 10534 | 10550 | CGCGATTCACTGAGGAC | 71 | 4157 |
| 525403 | 10535 | 10551 | GCGCGATTCACTGAGGA | 68 | 4158 |
| 525404 | 10536 | 10552 | TGCGCGATTCACTGAGG | 65 | 4159 |
| 525405 | 10537 | 10553 | CTGCGCGATTCACTGAG | 60 | 4160 |
| 525406 | 10538 | 10554 | TCTGCGCGATTCACTGA | 45 | 4161 |
| 525407 | 10650 | 10666 | TCCTCCCACTTCAGTTT | 28 | 4162 |
| 525408 | 10651 | 10667 | TTCCTCCCACTTCAGTT | 18 | 4163 |
| 525409 | 10652 | 10668 | CTTCCTCCCACTTCAGT | 30 | 4164 |
| 525410 | 10654 | 10670 | TGCTTCCTCCCACTTCA | 30 | 4165 |
| 525411 | 10655 | 10671 | ATGCTTCCTCCCACTTC | 37 | 4166 |
| 525412 | 10656 | 10672 | CATGCTTCCTCCCACTT | 32 | 4167 |
| 525413 | 10657 | 10673 | GCATGCTTCCTCCCACT | 59 | 4168 |
| 525414 | 10658 | 10674 | GGCATGCTTCCTCCCAC | 69 | 4169 |
| 525415 | 10659 | 10675 | AGGCATGCTTCCTCCCA | 71 | 4170 |
| 525416 | 10660 | 10676 | TAGGCATGCTTCCTCCC | 62 | 4171 |
| 525417 | 10661 | 10677 | TTAGGCATGCTTCCTCC | 53 | 4172 |
| 525418 | 10662 | 10678 | CTTAGGCATGCTTCCTC | 53 | 4173 |
| 525419 | 10663 | 10679 | ACTTAGGCATGCTTCCT | 63 | 4174 |
| 525420 | 10664 | 10680 | AACTTAGGCATGCTTCC | 62 | 4175 |
| 525421 | 10665 | 10681 | AAACTTAGGCATGCTTC | 50 | 4176 |
| 525422 | 10666 | 10682 | AAAACTTAGGCATGCTT | 58 | 4177 |
| 525423 | 10667 | 10683 | GAAAACTTAGGCATGCT | 68 | 4178 |
| 525424 | 10668 | 10684 | GGAAAACTTAGGCATGC | 65 | 4179 |
| 525425 | 10669 | 10685 | AGGAAAACTTAGGCATG | 41 | 4180 |
| 525426 | 10670 | 10686 | AAGGAAAACTTAGGCAT | 15 | 4181 |
| 525427 | 10671 | 10687 | TAAGGAAAACTTAGGCA | 15 | 4182 |
| 525428 | 10672 | 10688 | CTAAGGAAAACTTAGGC | 12 | 4183 |
| 525429 | 10728 | 10744 | GATGACTTCCCAGGGTC | 32 | 4184 |
| 525430 | 10729 | 10745 | TGATGACTTCCCAGGGT | 41 | 4185 |
| 525431 | 10730 | 10746 | GTGATGACTTCCCAGGG | 78 | 4186 |
| 525432 | 10731 | 10747 | TGTGATGACTTCCCAGG | 51 | 4187 |
| 525433 | 10732 | 10748 | CTGTGATGACTTCCCAG | 41 | 4188 |
| 525434 | 10733 | 10749 | GCTGTGATGACTTCCCA | 63 | 4189 |
| 525435 | 10734 | 10750 | AGCTGTGATGACTTCCC | 61 | 4190 |
| 525436 | 10735 | 10751 | CAGCTGTGATGACTTCC | 60 | 4191 |
| 525437 | 10736 | 10752 | ACAGCTGTGATGACTTC | 31 | 4192 |
| 525438 | 10737 | 10753 | GACAGCTGTGATGACTT | 0 | 4193 |
| 525439 | 10816 | 10832 | TGTCAGAGAGGCTCAGC | 59 | 4194 |
| 525440 | 10817 | 10833 | ATGTCAGAGAGGCTCAG | 41 | 4195 |
| 525441 | 10818 | 10834 | CATGTCAGAGAGGCTCA | 60 | 4196 |
| 525442 | 10819 | 10835 | CCATGTCAGAGAGGCTC | 73 | 4197 |
| 525443 | 10820 | 10836 | TCCATGTCAGAGAGGCT | 75 | 4198 |
| 525444 | 10821 | 10837 | ATCCATGTCAGAGAGGC | 64 | 4199 |
| 525445 | 10822 | 10838 | AATCCATGTCAGAGAGG | 44 | 4200 |
| 525446 | 10823 | 10839 | AAATCCATGTCAGAGAG | 10 | 4201 |
| 525447 | 10940 | 10956 | TAGTCGATTTACCAGAA | 31 | 4202 |
| 525448 | 10941 | 10957 | ATAGTCGATTTACCAGA | 31 | 4203 |
| 525449 | 10942 | 10958 | GATAGTCGATTTACCAG | 43 | 4204 |
| 525450 | 10943 | 10959 | GGATAGTCGATTTACCA | 62 | 4205 |
| 525451 | 10944 | 10960 | TGGATAGTCGATTTACC | 48 | 4206 |
| 525452 | 10945 | 10961 | TTGGATAGTCGATTTAC | 36 | 4207 |
| 525453 | 10946 | 10962 | TTTGGATAGTCGATTTA | 16 | 4208 |
| 525454 | 11074 | 11090 | CGATGTTACATTAAGGG | 26 | 4209 |
| 525455 | 11075 | 11091 | TCGATGTTACATTAAGG | 24 | 4210 |
| 525456 | 11076 | 11092 | CTCGATGTTACATTAAG | 11 | 4211 |
| 496041 | 31122 | 31138 | CACAGCGATGAGCCAGC | 52 | 1096 |
| 413433 | 32431 | 32450 | GCCTGGACAAGTCCTGCCCA | 69 | 425 |
| 525765 | 36860 | 36876 | ATTATTCTAAAACTCAA | 11 | 4212 |
| 525766 | 36861 | 36877 | GATTATTCTAAAACTCA | 6 | 4213 |
| 525767 | 36862 | 36878 | TGATTATTCTAAAACTC | 7 | 4214 |
| 525768 | 37022 | 37038 | GGGCAGTCACCATTTGC | 14 | 4215 |
| 525769 | 37023 | 37039 | TGGGCAGTCACCATTTG | 12 | 4216 |
| 525770 | 37024 | 37040 | TTGGGCAGTCACCATTT | 7 | 4217 |

TABLE 60
Inhibition of DGAT2 mRNA by 3-10-4 MOE
gapmers targeting SEQ ID NO: 2

| | SEQ | SEQ | | | |
|---|---|---|---|---|---|
| | ID | ID | | | |
| | NO: | NO: | | | |
| | 2 | 2 | | % | SEQ |
| ISIS | Start | Stop | | inhi- | ID |
| NO | Site | Site | Sequence | bition | NO |
| 525457 | 11077 | 11093 | CCTCGATGTTACATTAA | 44 | 4218 |
| 525458 | 11127 | 11143 | TATTGCAACCACTAGGA | 36 | 4219 |
| 525459 | 11128 | 11144 | TTATTGCAACCACTAGG | 41 | 4220 |
| 525460 | 11129 | 11145 | GTTATTGCAACCACTAG | 49 | 4221 |
| 525461 | 11130 | 11146 | GGTTATTGCAACCACTA | 61 | 4222 |
| 525462 | 11158 | 11174 | AGTTAAAGTGTGGTACA | 4 | 4223 |
| 525463 | 11159 | 11175 | CAGTTAAAGTGTGGTAC | 37 | 4224 |
| 525464 | 11160 | 11176 | ACAGTTAAAGTGTGGTA | 14 | 4225 |
| 525465 | 11171 | 11187 | ATGCCTAGGTCACAGTT | 55 | 4226 |
| 525466 | 11172 | 11188 | AATGCCTAGGTCACAGT | 48 | 4227 |
| 525467 | 11173 | 11189 | CAATGCCTAGGTCACAG | 44 | 4228 |
| 525468 | 11174 | 11190 | CCAATGCCTAGGTCACA | 73 | 4229 |
| 525469 | 11175 | 11191 | GCCAATGCCTAGGTCAC | 89 | 4230 |
| 525470 | 11176 | 11192 | TGCCAATGCCTAGGTCA | 82 | 4231 |
| 525471 | 11177 | 11193 | ATGCCAATGCCTAGGTC | 79 | 4232 |
| 525472 | 11178 | 11194 | AATGCCAATGCCTAGGT | 76 | 4233 |
| 525473 | 11179 | 11195 | CAATGCCAATGCCTAGG | 69 | 4234 |
| 525474 | 11180 | 11196 | GCAATGCCAATGCCTAG | 78 | 4235 |
| 525475 | 11199 | 11215 | AGCGATAATCACACAAG | 54 | 4236 |
| 525476 | 11200 | 11216 | CAGCGATAATCACACAA | 58 | 4237 |
| 525477 | 11201 | 11217 | ACAGCGATAATCACACA | 72 | 4238 |
| 525478 | 11202 | 11218 | CACAGCGATAATCACAC | 49 | 4239 |
| 525479 | 11203 | 11219 | CCACAGCGATAATCACA | 79 | 4240 |
| 525480 | 11204 | 11220 | ACCACAGCGATAATCAC | 76 | 4241 |
| 525481 | 11205 | 11221 | AACCACAGCGATAATCA | 40 | 4242 |
| 525482 | 14503 | 14519 | GGTCTGCCACTCTCTAC | 49 | 4243 |
| 525483 | 14504 | 14520 | GGGTCTGCCACTCTCTA | 47 | 4244 |
| 525484 | 14505 | 14521 | AGGGTCTGCCACTCTCT | 64 | 4245 |
| 525485 | 14648 | 14664 | AGTCATCTTGTGTACAT | 60 | 4246 |
| 525486 | 14649 | 14665 | CAGTCATCTTGTGTACA | 49 | 4247 |
| 525487 | 14650 | 14666 | ACAGTCATCTTGTGTAC | 52 | 4248 |
| 525488 | 14663 | 14679 | CAGATCACTCTGCACAG | 62 | 4249 |
| 525489 | 14664 | 14680 | TCAGATCACTCTGCACA | 65 | 4250 |
| 525490 | 14665 | 14681 | CTCAGATCACTCTGCAC | 61 | 4251 |
| 525491 | 14667 | 14683 | TGCTCAGATCACTCTGC | 60 | 4252 |
| 525492 | 14668 | 14684 | TTGCTCAGATCACTCTG | 51 | 4253 |
| 525493 | 14669 | 14685 | ATTGCTCAGATCACTCT | 54 | 4254 |
| 525494 | 14745 | 14761 | ACCTCTTCCAGGAAGAC | 41 | 4255 |
| 525495 | 14746 | 14762 | CACCTCTTCCAGGAAGA | 44 | 4256 |
| 525496 | 14747 | 14763 | TCACCTCTTCCAGGAAG | 28 | 4257 |
| 525497 | 14755 | 14771 | ACTGAATGTCACCTCTT | 57 | 4258 |
| 525498 | 14756 | 14772 | GACTGAATGTCACCTCT | 62 | 4259 |
| 525499 | 14757 | 14773 | GGACTGAATGTCACCTC | 71 | 4260 |
| 525500 | 14758 | 14774 | CGGACTGAATGTCACCT | 74 | 4261 |
| 525501 | 14759 | 14775 | CCGGACTGAATGTCACC | 80 | 4262 |
| 525502 | 14760 | 14776 | TCCGGACTGAATGTCAC | 39 | 4263 |
| 525503 | 14770 | 14786 | TCTTTCCAGATCCGGAC | 53 | 4264 |
| 525504 | 14771 | 14787 | ATCTTTCCAGATCCGGA | 62 | 4265 |
| 525505 | 14772 | 14788 | CATCTTTCCAGATCCGG | 70 | 4266 |
| 525506 | 14773 | 14789 | TCATCTTTCCAGATCCG | 71 | 4267 |
| 525507 | 14774 | 14790 | TTCATCTTTCCAGATCC | 63 | 4268 |
| 525508 | 14775 | 14791 | ATTCATCTTTCCAGATC | 23 | 4269 |
| 525509 | 14996 | 15012 | TCTCAAGTCTTCCTCCT | 33 | 4270 |
| 525510 | 14997 | 15013 | CTCTCAAGTCTTCCTCC | 46 | 4271 |
| 525511 | 14998 | 15014 | GCTCTCAAGTCTTCCTC | 65 | 4272 |
| 525512 | 14999 | 15015 | AGCTCTCAAGTCTTCCT | 72 | 4273 |
| 525513 | 15000 | 15016 | GAGCTCTCAAGTCTTCC | 73 | 4274 |
| 525514 | 15001 | 15017 | TGAGCTCTCAAGTCTTC | 64 | 4275 |
| 525515 | 15250 | 15266 | ATAATCTGCACAGGTTC | 72 | 4276 |
| 525516 | 15251 | 15267 | CATAATCTGCACAGGTT | 67 | 4277 |
| 525517 | 15252 | 15268 | CCATAATCTGCACAGGT | 69 | 4278 |
| 525518 | 15253 | 15269 | ACCATAATCTGCACAGG | 68 | 4279 |
| 525519 | 15254 | 15270 | CACCATAATCTGCACAG | 49 | 4280 |
| 525520 | 15255 | 15271 | GCACCATAATCTGCACA | 60 | 4281 |
| 525521 | 18156 | 18172 | TTAATCCAGGATTGTCA | 55 | 4282 |
| 525522 | 18157 | 18173 | TTTAATCCAGGATTGTC | 57 | 4283 |
| 525523 | 18158 | 18174 | CTTTAATCCAGGATTGT | 26 | 4284 |
| 525524 | 18161 | 18177 | TAGCTTTAATCCAGGAT | 42 | 4285 |
| 525525 | 18162 | 18178 | TTAGCTTTAATCCAGGA | 28 | 4286 |
| 525526 | 18163 | 18179 | CTTAGCTTTAATCCAGG | 45 | 4287 |
| 525527 | 18164 | 18180 | CCTTAGCTTTAATCCAG | 27 | 4288 |
| 525528 | 18165 | 18181 | TCCTTAGCTTTAATCCA | 60 | 4289 |
| 525529 | 18166 | 18182 | CTCCTTAGCTTTAATCC | 23 | 4290 |
| 525530 | 18167 | 18183 | CCTCCTTAGCTTTAATC | 32 | 4291 |
| 525531 | 18168 | 18184 | TCCTCCTTAGCTTTAAT | 28 | 4292 |
| 525532 | 18174 | 18190 | TCAGTGTCCTCCTTAGC | 39 | 4293 |
| 525533 | 18175 | 18191 | CTCAGTGTCCTCCTTAG | 32 | 4294 |
| 496041 | 31122 | 31138 | CACAGCGATGAGCCAGC | 64 | 1096 |
| 413433 | 32431 | 32450 | GCCTGGACAAGTCCTGCCCA | 78 | 425 |

TABLE 61
Inhibition of DGAT2 mRNA by 3-10-4 MOE
gapmers targeting SEQ ID NO: 2

| | SEQ | SEQ | | | |
|---|---|---|---|---|---|
| | ID | ID | | | |
| | NO: | NO: | | | |
| | 2 | 2 | | % | SEQ |
| ISIS | Start | Stop | | inhi- | ID |
| NO | Site | Site | Sequence | bition | NO |
| 525534 | 18176 | 18192 | ACTCAGTGTCCTCCTTA | 35 | 4295 |
| 525535 | 18177 | 18193 | GACTCAGTGTCCTCCTT | 64 | 4296 |
| 525536 | 18178 | 18194 | GGACTCAGTGTCCTCCT | 73 | 4297 |
| 525537 | 18180 | 18196 | TGGGACTCAGTGTCCTC | 62 | 4298 |
| 525538 | 18181 | 18197 | CTGGGACTCAGTGTCCT | 59 | 4299 |
| 525539 | 18182 | 18198 | CCTGGGACTCAGTGTCC | 63 | 4300 |
| 525540 | 18308 | 18324 | CTGTTTGATGGGTAAAA | 20 | 4301 |
| 525541 | 18309 | 18325 | CCTGTTTGATGGGTAAA | 62 | 4302 |
| 525542 | 18310 | 18326 | TCCTGTTTGATGGGTAA | 68 | 4303 |
| 525543 | 18311 | 18327 | CTCCTGTTTGATGGGTA | 39 | 4304 |
| 525544 | 18312 | 18328 | TCTCCTGTTTGATGGGT | 73 | 4305 |
| 525545 | 18313 | 18329 | CTCTCCTGTTTGATGGG | 47 | 4306 |
| 525546 | 18314 | 18330 | CCTCTCCTGTTTGATGG | 43 | 4307 |
| 525547 | 18321 | 18337 | TCGGTGTCCTCTCCTGT | 63 | 4308 |
| 525548 | 18322 | 18338 | CTCGGTGTCCTCTCCTG | 64 | 4309 |
| 525549 | 18323 | 18339 | CCTCGGTGTCCTCTCCT | 60 | 4310 |
| 525550 | 18324 | 18340 | GCCTCGGTGTCCTCTCC | 68 | 4311 |
| 525551 | 18325 | 18341 | AGCCTCGGTGTCCTCTC | 78 | 4312 |
| 525552 | 18326 | 18342 | AAGCCTCGGTGTCCTCT | 73 | 4313 |
| 525553 | 18327 | 18343 | TAAGCCTCGGTGTCCTC | 70 | 4314 |
| 525554 | 18328 | 18344 | GTAAGCCTCGGTGTCCT | 75 | 4315 |
| 525555 | 18329 | 18345 | AGTAAGCCTCGGTGTCC | 64 | 4316 |
| 525556 | 18417 | 18433 | CCAGATTGTTGTGGGAA | 66 | 4317 |
| 525557 | 18418 | 18434 | ACCAGATTGTTGTGGGA | 68 | 4318 |
| 525558 | 18419 | 18435 | CACCAGATTGTTGTGGG | 63 | 4319 |
| 525559 | 18432 | 18448 | CTAATACCTACCTCACC | 35 | 4320 |
| 525560 | 18433 | 18449 | GCTAATACCTACCTCAC | 25 | 4321 |
| 525561 | 18434 | 18450 | GGCTAATACCTACCTCA | 34 | 4322 |
| 525562 | 18450 | 18466 | CTCATCTATACAGTGGG | 58 | 4323 |
| 525563 | 18451 | 18467 | CCTCATCTATACAGTGG | 51 | 4324 |
| 525564 | 18452 | 18468 | TCCTCATCTATACAGTG | 28 | 4325 |
| 525565 | 18581 | 18597 | ACTGGCATCTGGCAGGG | 69 | 4326 |
| 525566 | 18582 | 18598 | TACTGGCATCTGGCAGG | 52 | 4327 |
| 525567 | 18583 | 18599 | ATACTGGCATCTGGCAG | 31 | 4328 |
| 525568 | 18591 | 18607 | TCACCTCCATACTGGCA | 21 | 4329 |
| 525569 | 18592 | 18608 | CTCACCTCCATACTGGC | 20 | 4330 |
| 525570 | 18593 | 18609 | CCTCACCTCCATACTGG | 6 | 4331 |
| 525571 | 18828 | 18844 | ATGCTTAACTTCTGCTG | 48 | 4332 |
| 525572 | 18829 | 18845 | GATGCTTAACTTCTGCT | 46 | 4333 |
| 525573 | 18830 | 18846 | GGATGCTTAACTTCTGC | 53 | 4334 |
| 525574 | 18831 | 18847 | AGGATGCTTAACTTCTG | 40 | 4335 |
| 525575 | 18832 | 18848 | TAGGATGCTTAACTTCT | 40 | 4336 |
| 525576 | 18833 | 18849 | TTAGGATGCTTAACTTC | 20 | 4337 |
| 525577 | 18869 | 18885 | GGCCTGGATGCCCAAGT | 65 | 4338 |
| | 20779 | 20795 | | | |
| 525578 | 18870 | 18886 | AGGCCTGGATGCCCAAG | 71 | 4339 |
| | 20780 | 20796 | | | |
| 525579 | 18871 | 18887 | TAGGCCTGGATGCCCAA | 66 | 4340 |
| | 20781 | 20797 | | | |
| 525580 | 18900 | 18916 | CAGATGATGTCCTGCCT | 25 | 4341 |
| 525581 | 18901 | 18917 | GCAGATGATGTCCTGCC | 55 | 4342 |
| 525582 | 18902 | 18918 | AGCAGATGATGTCCTGC | 38 | 4343 |
| 525583 | 19018 | 19034 | TAGTCAAAGGTGGCTTC | 44 | 4344 |
| 525584 | 19019 | 19035 | GTAGTCAAAGGTGGCTT | 57 | 4345 |
| 525585 | 19020 | 19036 | AGTAGTCAAAGGTGGCT | 55 | 4346 |
| 525589 | 22548 | 22564 | AACAAGTGGGAAATGCA | 17 | 4347 |
| 525590 | 22549 | 22565 | CAACAAGTGGGAAATGC | 19 | 4348 |
| 525591 | 22550 | 22566 | CCAACAAGTGGGAAATG | 23 | 4349 |
| 525592 | 22771 | 22787 | AGCTTATTAGGTGTCTT | 42 | 4350 |
| 525593 | 22772 | 22788 | AAGCTTATTAGGTGTCT | 53 | 4351 |
| 525594 | 22773 | 22789 | TAAGCTTATTAGGTGTC | 44 | 4352 |
| 525595 | 22774 | 22790 | CTAAGCTTATTAGGTGT | 36 | 4353 |
| 525596 | 22886 | 22902 | CCCCCATGCAGCTTGGA | 29 | 4354 |
| 525597 | 22887 | 22903 | GCCCCCATGCAGCTTGG | 43 | 4355 |
| 525598 | 22888 | 22904 | AGCCCCCATGCAGCTTG | 50 | 4356 |
| 525599 | 23096 | 23112 | CCAAACACTCAGGTAGG | 49 | 4357 |
| 525600 | 23097 | 23113 | TCCAAACACTCAGGTAG | 41 | 4358 |
| 525601 | 23098 | 23114 | GTCCAAACACTCAGGTA | 54 | 4359 |
| 525602 | 23100 | 23116 | CAGTCCAAACACTCAGG | 47 | 4360 |
| 525603 | 23101 | 23117 | TCAGTCCAAACACTCAG | 57 | 4361 |
| 525604 | 23102 | 23118 | TTCAGTCCAAACACTCA | 49 | 4362 |
| 525605 | 23239 | 23255 | GAACAGCAGCATCAGCA | 47 | 4363 |
| 525606 | 23240 | 23256 | GGAACAGCAGCATCAGC | 67 | 4364 |
| 525607 | 23241 | 23257 | GGGAACAGCAGCATCAG | 40 | 4365 |
| 525608 | 23242 | 23258 | TGGGAACAGCAGCATCA | 44 | 4366 |
| 525609 | 23243 | 23259 | CTGGGAACAGCAGCATC | 69 | 4367 |
| 525610 | 23244 | 23260 | TCTGGGAACAGCAGCAT | 65 | 4368 |
| 525586 | 36855 | 36871 | TCTAAAACTCAAATCCA | 0 | 4369 |
| 525587 | 36856 | 36872 | TTCTAAAACTCAAATCC | 0 | 4370 |
| 525588 | 36857 | 36873 | ATTCTAAAACTCAAATC | 0 | 4371 |
| 496041 | 31122 | 31138 | CACAGCGATGAGCCAGC | 64 | 1096 |
| 413433 | 32431 | 32450 | GCCTGGACAAGTCCTGCCCA | 78 | 425 |

TABLE 62
Inhibition of DGAT2 mRNA by 3-10-4 MOE
gapmers targeting SEQ ID NO: 2

| | SEQ | SEQ | | | |
|---|---|---|---|---|---|
| | ID | ID | | | |
| | NO: | NO: | | | |
| | 2 | 2 | | % | SEQ |
| ISIS | Start | Stop | | inhi- | ID |
| NO | Site | Site | Sequence | bition | NO |
| 525611 | 23245 | 23261 | GTCTGGGAACAGCAGCA | 65 | 4372 |
| 525612 | 23246 | 23262 | GGTCTGGGAACAGCAGC | 83 | 4373 |
| 525613 | 23247 | 23263 | TGGTCTGGGAACAGCAG | 42 | 4374 |
| 525614 | 23427 | 23443 | ACAAGTCATCTTCCAGC | 16 | 4375 |
| 525615 | 23428 | 23444 | GACAAGTCATCTTCCAG | 24 | 4376 |
| 525616 | 23429 | 23445 | GGACAAGTCATCTTCCA | 37 | 4377 |
| 525617 | 23551 | 23567 | ATCCTTGAGGGTCTCAT | 55 | 4378 |
| 525618 | 23552 | 23568 | TATCCTTGAGGGTCTCA | 55 | 4379 |
| 525619 | 23553 | 23569 | TTATCCTTGAGGGTCTC | 65 | 4380 |
| 525620 | 23554 | 23570 | CTTATCCTTGAGGGTCT | 46 | 4381 |
| 525621 | 26400 | 26416 | CCTGGATGGCAACCTAA | 42 | 4382 |
| 525622 | 26401 | 26417 | GCCTGGATGGCAACCTA | 33 | 4383 |
| 525623 | 26402 | 26418 | GGCCTGGATGGCAACCT | 43 | 4384 |
| 525624 | 26484 | 26500 | CTGCTATGCTGAGAGCA | 44 | 4385 |
| 525625 | 26485 | 26501 | CCTGCTATGCTGAGAGC | 42 | 4386 |
| 525626 | 26486 | 26502 | ACCTGCTATGCTGAGAG | 8 | 4387 |
| 525627 | 26516 | 26532 | GTTCATCTGCCTTGACG | 44 | 4388 |
| 525628 | 26517 | 26533 | GGTTCATCTGCCTTGAC | 56 | 4389 |
| 525629 | 26518 | 26534 | AGGTTCATCTGCCTTGA | 33 | 4390 |
| 525630 | 26519 | 26535 | CAGGTTCATCTGCCTTG | 55 | 4391 |
| 525631 | 26520 | 26536 | GCAGGTTCATCTGCCTT | 75 | 4392 |
| 525632 | 26521 | 26537 | AGCAGGTTCATCTGCCT | 62 | 4393 |
| 525633 | 26536 | 26552 | TCTGTGATGCTCTGGAG | 33 | 4394 |
| 525634 | 26537 | 26553 | CTCTGTGATGCTCTGGA | 43 | 4395 |
| 525635 | 26538 | 26554 | ACTCTGTGATGCTCTGG | 46 | 4396 |
| 525636 | 26539 | 26555 | CACTCTGTGATGCTCTG | 39 | 4397 |
| 525637 | 26627 | 26643 | ACATGGTAAGTCCTGAT | 38 | 4398 |
| 525638 | 26628 | 26644 | GACATGGTAAGTCCTGA | 55 | 4399 |
| 525639 | 26629 | 26645 | TGACATGGTAAGTCCTG | 58 | 4400 |
| 525640 | 26630 | 26646 | CTGACATGGTAAGTCCT | 55 | 4401 |
| 525641 | 26631 | 26647 | ACTGACATGGTAAGTCC | 35 | 4402 |
| 525642 | 26632 | 26648 | CACTGACATGGTAAGTC | 48 | 4403 |
| 525643 | 26783 | 26799 | TCTGCCATTTAATGAGC | 19 | 4404 |
| 525644 | 26784 | 26800 | CTCTGCCATTTAATGAG | 22 | 4405 |
| 525645 | 26785 | 26801 | ACTCTGCCATTTAATGA | 12 | 4406 |
| 525646 | 26788 | 26804 | CCAACTCTGCCATTTAA | 43 | 4407 |
| 525647 | 26789 | 26805 | CCCAACTCTGCCATTTA | 47 | 4408 |
| 525648 | 26790 | 26806 | TCCCAACTCTGCCATTT | 35 | 4409 |
| 525649 | 26926 | 26942 | AGGGTTCATGGATCCCC | 69 | 4410 |
| 525650 | 26927 | 26943 | AAGGGTTCATGGATCCC | 67 | 4411 |
| 525651 | 26928 | 26944 | TAAGGGTTCATGGATCC | 44 | 4412 |
| 525652 | 27251 | 27267 | CTGGAGTCCCTGGGTTC | 45 | 4413 |
| 525653 | 27252 | 27268 | GCTGGAGTCCCTGGGTT | 30 | 4414 |
| 525654 | 27253 | 27269 | GGCTGGAGTCCCTGGGT | 31 | 4415 |
| 525655 | 27352 | 27368 | AGCCAGGCCCAGACCCA | 32 | 4416 |
| 525656 | 27353 | 27369 | CAGCCAGGCCCAGACCC | 22 | 4417 |
| 525657 | 27354 | 27370 | CCAGCCAGGCCCAGACC | 11 | 4418 |
| 525658 | 27382 | 27398 | GGTGTTCTACAAGCTGC | 61 | 4419 |
| 525659 | 27383 | 27399 | TGGTGTTCTACAAGCTG | 50 | 4420 |
| 525660 | 27384 | 27400 | CTGGTGTTCTACAAGCT | 49 | 4421 |
| 525661 | 27387 | 27403 | GAGCTGGTGTTCTACAA | 34 | 4422 |
| 525662 | 27388 | 27404 | TGAGCTGGTGTTCTACA | 47 | 4423 |
| 525663 | 27389 | 27405 | GTGAGCTGGTGTTCTAC | 55 | 4424 |
| 525664 | 27437 | 27453 | GATCAATTATTAACCTA | 14 | 4425 |
| 525665 | 27438 | 27454 | TGATCAATTATTAACCT | 0 | 4426 |
| 525666 | 27439 | 27455 | CTGATCAATTATTAACC | 5 | 4427 |
| 525667 | 29678 | 29694 | GCAGGTACTCATGTTTG | 50 | 4428 |
| 525668 | 29679 | 29695 | AGCAGGTACTCATGTTT | 39 | 4429 |
| 525669 | 29680 | 29696 | CAGCAGGTACTCATGTT | 31 | 4430 |
| 525670 | 29782 | 29798 | CCAATATCATACTATCT | 5 | 4431 |
| 525671 | 29783 | 29799 | CCCAATATCATACTATC | 13 | 4432 |
| 525672 | 29784 | 29800 | CCCCAATATCATACTAT | 40 | 4433 |
| 525673 | 29828 | 29844 | AACCTTTAAGGCCTATC | 16 | 4434 |
| 525674 | 29829 | 29845 | CAACCTTTAAGGCCTAT | 23 | 4435 |
| 525675 | 29830 | 29846 | CCAACCTTTAAGGCCTA | 35 | 4436 |
| 525676 | 29831 | 29847 | CCCAACCTTTAAGGCCT | 40 | 4437 |
| 525677 | 29839 | 29855 | ATTTTTTACCCAACCTT | 30 | 4438 |
| 525678 | 29840 | 29856 | CATTTTTTACCCAACCT | 24 | 4439 |
| 525679 | 29841 | 29857 | CCATTTTTTACCCAACC | 50 | 4440 |
| 525680 | 29842 | 29858 | TCCATTTTTTACCCAAC | 40 | 4441 |
| 525681 | 29843 | 29859 | TTCCATTTTTTACCCAA | 24 | 4442 |
| 525682 | 30483 | 30499 | GCTTTAGAAATTCACCA | 45 | 4443 |
| 525683 | 30484 | 30500 | GGCTTTAGAAATTCACC | 68 | 4444 |
| 525684 | 30485 | 30501 | AGGCTTTAGAAATTCAC | 39 | 4445 |
| 496041 | 31122 | 31138 | CACAGCGATGAGCCAGC | 58 | 1096 |
| 413433 | 32431 | 32450 | GCCTGGACAAGTCCTGCCCA | 76 | 425 |
| 525685 | 32431 | 32447 | TGGACAAGTCCTGCCCA | 47 | 4446 |
| 525686 | 32432 | 32448 | CTGGACAAGTCCTGCCC | 58 | 4447 |
| 525687 | 32433 | 32449 | CCTGGACAAGTCCTGCC | 60 | 4448 |

TABLE 63
Inhibition of DGAT2 mRNA by 3-10-4 MOE
gapmers targeting SEQ ID NO: 2

| | SEQ | SEQ | | | |
|---|---|---|---|---|---|
| | ID | ID | | | |
| | NO: | NO: | | | |
| | 2 | 2 | | % | SEQ |
| ISIS | Start | Stop | | inhi- | ID |
| NO | Site | Site | Sequence | bition | NO |
| 496041 | 31122 | 31138 | CACAGCGATGAGCCAGC | 44 | 1096 |
| 413433 | 32431 | 32450 | GCCTGGACAAGTCCTGCCCA | 74 | 425 |
| 525688 | 32434 | 32450 | GCCTGGACAAGTCCTGC | 77 | 4449 |
| 525689 | 32435 | 32451 | AGCCTGGACAAGTCCTG | 50 | 4450 |
| 525690 | 32447 | 32463 | ACTAGACTATGCAGCCT | 62 | 4451 |
| 525691 | 32448 | 32464 | TACTAGACTATGCAGCC | 55 | 4452 |
| 525692 | 32449 | 32465 | ATACTAGACTATGCAGC | 37 | 4453 |
| 525693 | 32450 | 32466 | CATACTAGACTATGCAG | 17 | 4454 |
| 525694 | 32451 | 32467 | TCATACTAGACTATGCA | 20 | 4455 |
| 525695 | 32452 | 32468 | ATCATACTAGACTATGC | 20 | 4456 |
| 525696 | 32453 | 32469 | CATCATACTAGACTATG | 13 | 4457 |
| 525697 | 32454 | 32470 | CCATCATACTAGACTAT | 32 | 4458 |
| 525698 | 32455 | 32471 | GCCATCATACTAGACTA | 58 | 4459 |
| 525699 | 32456 | 32472 | TGCCATCATACTAGACT | 51 | 4460 |
| 525700 | 32457 | 32473 | TTGCCATCATACTAGAC | 40 | 4461 |
| 525701 | 32458 | 32474 | GTTGCCATCATACTAGA | 51 | 4462 |
| 525702 | 32460 | 32476 | ATGTTGCCATCATACTA | 52 | 4463 |
| 525703 | 32461 | 32477 | AATGTTGCCATCATACT | 28 | 4464 |
| 525704 | 32462 | 32478 | CAATGTTGCCATCATAC | 40 | 4465 |
| 525705 | 32463 | 32479 | GCAATGTTGCCATCATA | 73 | 4466 |
| 525706 | 32464 | 32480 | TGCAATGTTGCCATCAT | 62 | 4467 |
| 525707 | 32465 | 32481 | TTGCAATGTTGCCATCA | 61 | 4468 |
| 525708 | 32466 | 32482 | GTTGCAATGTTGCCATC | 79 | 4469 |
| 525709 | 32467 | 32483 | GGTTGCAATGTTGCCAT | 69 | 4470 |
| 525710 | 32468 | 32484 | TGGTTGCAATGTTGCCA | 66 | 4471 |
| 525711 | 32469 | 32485 | GTGGTTGCAATGTTGCC | 73 | 4472 |
| 525712 | 32470 | 32486 | GGTGGTTGCAATGTTGC | 45 | 4473 |
| 525713 | 32476 | 32492 | CTGGATGGTGGTTGCAA | 20 | 4474 |
| 525714 | 32477 | 32493 | CCTGGATGGTGGTTGCA | 59 | 4475 |
| 525715 | 32478 | 32494 | GCCTGGATGGTGGTTGC | 58 | 4476 |
| 525716 | 32479 | 32495 | AGCCTGGATGGTGGTTG | 34 | 4477 |
| 525717 | 32619 | 32635 | GAGATCTCCAGCAGCAA | 52 | 4478 |
| 525718 | 32620 | 32636 | TGAGATCTCCAGCAGCA | 57 | 4479 |
| 525719 | 32621 | 32637 | CTGAGATCTCCAGCAGC | 51 | 4480 |
| 525720 | 32622 | 32638 | ACTGAGATCTCCAGCAG | 16 | 4481 |
| 525721 | 32645 | 32661 | GGAGTGACAGGGCAGGA | 42 | 4482 |
| 525722 | 32646 | 32662 | TGGAGTGACAGGGCAGG | 42 | 4483 |
| 525723 | 32647 | 32663 | ATGGAGTGACAGGGCAG | 35 | 4484 |
| 525724 | 32752 | 32768 | AAGTCTATCAGGATGCA | 43 | 4485 |
| 525725 | 32753 | 32769 | AAAGTCTATCAGGATGC | 37 | 4486 |
| 525726 | 32754 | 32770 | CAAAGTCTATCAGGATG | 20 | 4487 |
| 525727 | 32755 | 32771 | ACAAAGTCTATCAGGAT | 0 | 4488 |
| 525728 | 32757 | 32773 | TGACAAAGTCTATCAGG | 25 | 4489 |
| 525729 | 32758 | 32774 | GTGACAAAGTCTATCAG | 51 | 4490 |
| 525730 | 32759 | 32775 | AGTGACAAAGTCTATCA | 28 | 4491 |
| 525731 | 33180 | 33196 | CCTAGTGCCCCAGGGAG | 29 | 4492 |
| 525732 | 33181 | 33197 | TCCTAGTGCCCCAGGGA | 25 | 4493 |
| 525733 | 33182 | 33198 | GTCCTAGTGCCCCAGGG | 74 | 4494 |
| 525734 | 33183 | 33199 | TGTCCTAGTGCCCCAGG | 53 | 4495 |
| 525735 | 36248 | 36264 | GGTATTCTGCTCATAAA | 43 | 4496 |
| 525736 | 36249 | 36265 | GGGTATTCTGCTCATAA | 50 | 4497 |
| 525737 | 36250 | 36266 | AGGGTATTCTGCTCATA | 65 | 4498 |
| 525738 | 36251 | 36267 | AAGGGTATTCTGCTCAT | 55 | 4499 |
| 525739 | 36252 | 36268 | TAAGGGTATTCTGCTCA | 58 | 4500 |
| 525740 | 36253 | 36269 | GTAAGGGTATTCTGCTC | 64 | 4501 |
| 525741 | 36254 | 36270 | AGTAAGGGTATTCTGCT | 60 | 4502 |
| 525742 | 36263 | 36279 | GAGACAATGAGTAAGGG | 25 | 4503 |
| 525743 | 36264 | 36280 | AGAGACAATGAGTAAGG | 19 | 4504 |
| 525744 | 36265 | 36281 | GAGAGACAATGAGTAAG | 11 | 4505 |
| 525745 | 36522 | 36538 | AAGCGACAGCCCTGTGC | 17 | 4506 |
| 525746 | 36523 | 36539 | CAAGCGACAGCCCTGTG | 16 | 4507 |
| 525747 | 36524 | 36540 | ACAAGCGACAGCCCTGT | 28 | 4508 |
| 525748 | 36652 | 36668 | AATGAGACAGGCAGCCC | 40 | 4509 |
| 525749 | 36653 | 36669 | GAATGAGACAGGCAGCC | 35 | 4510 |
| 525750 | 36654 | 36670 | AGAATGAGACAGGCAGC | 37 | 4511 |
| 525751 | 36679 | 36695 | CTCTGTGGGCTCCTCCA | 25 | 4512 |
| 525752 | 36680 | 36696 | GCTCTGTGGGCTCCTCC | 57 | 4513 |
| 525753 | 36681 | 36697 | TGCTCTGTGGGCTCCTC | 46 | 4514 |
| 525754 | 36682 | 36698 | GTGCTCTGTGGGCTCCT | 76 | 4515 |
| 525755 | 36683 | 36699 | TGTGCTCTGTGGGCTCC | 59 | 4516 |
| 525756 | 36686 | 36702 | CCCTGTGCTCTGTGGGC | 30 | 4517 |
| 525757 | 36687 | 36703 | GCCCTGTGCTCTGTGGG | 32 | 4518 |
| 525758 | 36688 | 36704 | GGCCCTGTGCTCTGTGG | 40 | 4519 |
| 525759 | 36738 | 36754 | CCACTGTCAGTCTCTCC | 40 | 4520 |
| 525760 | 36739 | 36755 | CCCACTGTCAGTCTCTC | 46 | 4521 |
| 525761 | 36740 | 36756 | CCCCACTGTCAGTCTCT | 29 | 4522 |
| 525762 | 36758 | 36774 | CTTGGCTGCAAGCTCTG | 22 | 4523 |
| 525763 | 36759 | 36775 | CCTTGGCTGCAAGCTCT | 37 | 4524 |
| 525764 | 36760 | 36776 | GCCTTGGCTGCAAGCTC | 30 | 4525 |

### Example 5: Antisense Inhibition of Human DGAT2 in HepG2 Cells by MOE Gapmers

[0460] Antisense oligonucleotides were designed targeting a diacylglycerol acyltransferase 2 (DGAT2) nucleic acid and were tested for their effects on DGAT2 mRNA in vitro. The antisense oligonucleotides were tested in a series of experiments that had similar culture conditions. The results for each experiment are presented in separate tables shown below. Cultured HepG2 cells at a density of 20,000 cells per well were transfected using electroporation with 1,000 nM antisense oligonucleotide. After a treatment period of approximately 24 hours, RNA was isolated from the cells and DGAT2 mRNA levels were measured by quantitative real-time PCR. Human primer probe set RTS2988_MGB was used to measure mRNA levels. DGAT2 mRNA levels were adjusted according to total RNA content, as measured by RIBOGREEN®. Results are presented as percent inhibition of DGAT2, relative to untreated control cells. ISIS 413433, which consistently demonstrated higher potency than any of the previously disclosed oligonucleotides in the studies above was included in this study as a benchmark oligonucleotide. Antisense oligonucleotides that demonstrated about the same or greater potency than ISIS 413433 were therefore considered for further experimentation.

[0461] The newly designed chimeric antisense oligonucleotides in the Tables below were designed as 5-10-5 MOE gapmers. The gapmers are 20 nucleosides in length, wherein the central gap segment comprises of ten 2′-deoxynucleosides and is flanked by wing segments on the 5′ direction and the 3′ direction comprising five nucleosides each. Each nucleoside in the 5′ wing segment and each nucleoside in the 3′ wing segment has a 2′-MOE modification. The internucleoside linkages throughout each gapmer are phosphorothioate (P═S) linkages. All cytosine residues throughout each gapmer are 5-methylcytosines. “Start site” indicates the 5′-most nucleoside to which the gapmer is targeted in the human gene sequence. “Stop site” indicates the 3′-most nucleoside to which the gapmer is targeted human gene sequence. Each gapmer listed in the Tables below is targeted to the human DGAT2 genomic sequence, designated herein as SEQ ID NO: 2 (Ref Seq No. NT 033927.5 truncated from nucleotides 5669186 to 5712008). ‘n/a’ indicates that the antisense oligonucleotide does not target that particular gene sequence with 100% complementarity. In case the sequence alignment for a target gene in a particular table is not shown, it is understood that none of the oligonucleotides presented in that table align with 100% complementarity with that target gene.

TABLE 64
Inhibition of DGAT2 mRNA by 5-10-5 MOE
gapmers targeting SEQ ID NO: 1 and 2

| | SEQ | SEQ | Sequence | | SEQ | SEQ | |
|---|---|---|---|---|---|---|---|
| | ID | ID | | | ID | ID | |
| | NO: | NO: | | | NO: | NO: | |
| | 1 | 1 | | % | 2 | 2 | SEQ |
| ISIS | Start | Stop | | inhi- | Start | Stop | ID |
| NO | Site | Site | | bition | Site | Site | NO |
| 472445 | 1000 | 1019 | CTGCATTCTTGCC | 70 | 38153 | 38172 | 4527 |
| | | | AGGCATG | | | | |
| 472446 | 1001 | 1020 | ACTGCATTCTTGC | 76 | 38154 | 38173 | 4528 |
| | | | CAGGCAT | | | | |
| 472447 | 1003 | 1022 | TGACTGCATTCTT | 82 | 38156 | 38175 | 4529 |
| | | | GCCAGGC | | | | |
| 472448 | 1004 | 1023 | GTGACTGCATTCT | 76 | 38157 | 38176 | 4530 |
| | | | TGCCAGG | | | | |
| 472449 | 1006 | 1025 | GGGTGACTGCATT | 42 | 38159 | 38178 | 4531 |
| | | | CTTGCCA | | | | |
| 472450 | 1007 | 1026 | AGGGTGACTGCAT | 81 | 38160 | 38179 | 4532 |
| | | | TCTTGCC | | | | |
| 472451 | 1008 | 1027 | CAGGGTGACTGCA | 71 | 38161 | 38180 | 4533 |
| | | | TTCTTGC | | | | |
| 472452 | 1010 | 1029 | CGCAGGGTGACTG | 69 | 38163 | 38182 | 4534 |
| | | | CATTCTT | | | | |
| 472453 | 1011 | 1030 | CCGCAGGGTGACT | 78 | 38164 | 38183 | 4535 |
| | | | GCATTCT | | | | |
| 472454 | 1013 | 1032 | TTCCGCAGGGTGA | 53 | 38166 | 38185 | 4536 |
| | | | CTGCATT | | | | |
| 472455 | 1014 | 1033 | GTTCCGCAGGGTG | 76 | 38167 | 38186 | 4537 |
| | | | ACTGCAT | | | | |
| 472456 | 1015 | 1034 | GGTTCCGCAGGGT | 86 | 38168 | 38187 | 4538 |
| | | | GACTGCA | | | | |
| 472457 | 1017 | 1036 | GCGGTTCCGCAGG | 77 | 38170 | 38189 | 4539 |
| | | | GTGACTG | | | | |
| 472458 | 1018 | 1037 | TGCGGTTCCGCAG | 81 | 38171 | 38190 | 4540 |
| | | | GGTGACT | | | | |
| 472459 | 1020 | 1039 | CTTGCGGTTCCGC | 60 | 38173 | 38192 | 4541 |
| | | | AGGGTGA | | | | |
| 472460 | 1021 | 1040 | CCTTGCGGTTCCG | 55 | 38174 | 38193 | 4542 |
| | | | CAGGGTG | | | | |
| 472461 | 1023 | 1042 | GCCCTTGCGGTTC | 23 | 38176 | 38195 | 4543 |
| | | | CGCAGGG | | | | |
| 472462 | 1024 | 1043 | AGCCCTTGCGGTT | 61 | 38177 | 38196 | 4544 |
| | | | CCGCAGG | | | | |
| 472463 | 1026 | 1045 | AAAGCCCTTGCGG | 76 | 38179 | 38198 | 4545 |
| | | | TTCCGCA | | | | |
| 472464 | 1027 | 1046 | CAAAGCCCTTGCG | 74 | 38180 | 38199 | 4546 |
| | | | GTTCCGC | | | | |
| 472465 | 1029 | 1048 | CACAAAGCCCTTG | 53 | 38182 | 38201 | 4547 |
| | | | CGGTTCC | | | | |
| 472466 | 1030 | 1049 | TCACAAAGCCCTT | 23 | 38183 | 38202 | 4548 |
| | | | GCGGTTC | | | | |
| 472467 | 1032 | 1051 | TTTCACAAAGCCC | 0 | 38185 | 38204 | 4549 |
| | | | TTGCGGT | | | | |
| 472468 | 1033 | 1052 | GTTTCACAAAGCC | 46 | 38186 | 38205 | 4550 |
| | | | CTTGCGG | | | | |
| 472469 | 1035 | 1054 | CAGTTTCACAAAG | 51 | 38188 | 38207 | 4551 |
| | | | CCCTTGC | | | | |
| 472470 | 1036 | 1055 | CCAGTTTCACAAA | 55 | 38189 | 38208 | 4552 |
| | | | GCCCTTG | | | | |
| 472471 | 1038 | 1057 | GGCCAGTTTCACA | 37 | 38191 | 38210 | 4553 |
| | | | AAGCCCT | | | | |
| 472472 | 1039 | 1058 | GGGCCAGTTTCAC | 0 | 38192 | 38211 | 4554 |
| | | | AAAGCCC | | | | |
| 472473 | 1041 | 1060 | CAGGGCCAGTTTC | 34 | 38194 | 38213 | 4555 |
| | | | ACAAAGC | | | | |
| 472474 | 1042 | 1061 | GCAGGGCCAGTTT | 63 | 38195 | 38214 | 4556 |
| | | | CACAAAG | | | | |
| 472475 | 1089 | 1108 | TTCATTCTCTCCA | 66 | 39136 | 39155 | 4557 |
| | | | AAGGAGT | | | | |
| 472476 | 1090 | 1109 | CTTCATTCTCTCC | 75 | 39137 | 39156 | 4558 |
| | | | AAAGGAG | | | | |
| 472477 | 1092 | 1111 | CACTTCATTCTCT | 78 | 39139 | 39158 | 4559 |
| | | | CCAAAGG | | | | |
| 472478 | 1093 | 1112 | ACACTTCATTCTC | 84 | 39140 | 39159 | 4560 |
| | | | TCCAAAG | | | | |
| 472479 | 1094 | 1113 | TACACTTCATTCT | 62 | 39141 | 39160 | 4561 |
| | | | CTCCAAA | | | | |
| 472480 | 1096 | 1115 | TGTACACTTCATT | 95 | 39143 | 39162 | 4562 |
| | | | CTCTCCA | | | | |
| 472481 | 1097 | 1116 | TTGTACACTTCAT | 89 | 39144 | 39163 | 4563 |
| | | | TCTCTCC | | | | |
| 472482 | 1099 | 1118 | GCTTGTACACTTC | 91 | 39146 | 39165 | 4564 |
| | | | ATTCTCT | | | | |
| 472483 | 1100 | 1119 | TGCTTGTACACTT | 75 | 39147 | 39166 | 4565 |
| | | | CATTCTC | | | | |
| 472484 | 1102 | 1121 | CCTGCTTGTACAC | 90 | 39149 | 39168 | 4566 |
| | | | TTCATTC | | | | |
| 472485 | 1103 | 1122 | ACCTGCTTGTACA | 86 | 39150 | 39169 | 4567 |
| | | | CTTCATT | | | | |
| 472486 | 1104 | 1123 | CACCTGCTTGTAC | 95 | 39151 | 39170 | 4568 |
| | | | ACTTCAT | | | | |
| 472487 | 1106 | 1125 | ATCACCTGCTTGT | 90 | 39153 | 39172 | 4569 |
| | | | ACACTTC | | | | |
| 472488 | 1107 | 1126 | GATCACCTGCTTG | 86 | 39154 | 39173 | 4570 |
| | | | TACACTT | | | | |
| 472489 | 1109 | 1128 | AAGATCACCTGCT | 69 | 39156 | 39175 | 4571 |
| | | | TGTACAC | | | | |
| 472490 | 1110 | 1129 | GAAGATCACCTGC | 63 | 39157 | 39176 | 4572 |
| | | | TTGTACA | | | | |
| 472491 | 1112 | 1131 | TCGAAGATCACCT | 72 | 39159 | 39178 | 4573 |
| | | | GCTTGTA | | | | |
| 472492 | 1113 | 1132 | CTCGAAGATCACC | 51 | 39160 | 39179 | 4574 |
| | | | TGCTTGT | | | | |
| 472493 | 1115 | 1134 | TCCTCGAAGATCA | 71 | 39162 | 39181 | 4575 |
| | | | CCTGCTT | | | | |
| 472494 | 1116 | 1135 | CTCCTCGAAGATC | 70 | 39163 | 39182 | 4576 |
| | | | ACCTGCT | | | | |
| 472495 | 1118 | 1137 | CCCTCCTCGAAGA | 69 | 39165 | 39184 | 4577 |
| | | | TCACCTG | | | | |
| 472496 | 1119 | 1138 | GCCCTCCTCGAAG | 87 | 39166 | 39185 | 4578 |
| | | | ATCACCT | | | | |
| 472497 | 1121 | 1140 | GAGCCCTCCTCGA | 54 | 39168 | 39187 | 4579 |
| | | | AGATCAC | | | | |
| 472498 | 1122 | 1141 | GGAGCCCTCCTCG | 77 | 39169 | 39188 | 4580 |
| | | | AAGATCA | | | | |
| 472499 | 1124 | 1143 | CAGGAGCCCTCCT | 65 | 39171 | 39190 | 4581 |
| | | | CGAAGAT | | | | |
| 472500 | 1125 | 1144 | CCAGGAGCCCTCC | 72 | 39172 | 39191 | 4582 |
| | | | TCGAAGA | | | | |
| 472501 | 1127 | 1146 | CCCCAGGAGCCCT | 60 | 39174 | 39193 | 4583 |
| | | | CCTCGAA | | | | |
| 472502 | 1128 | 1147 | GCCCCAGGAGCCC | 48 | 39175 | 39194 | 4584 |
| | | | TCCTCGA | | | | |
| 472503 | 1130 | 1149 | CGGCCCCAGGAGC | 21 | 39177 | 39196 | 4585 |
| | | | CCTCCTC | | | | |
| 472504 | 1131 | 1150 | TCGGCCCCAGGAG | 26 | 39178 | 39197 | 4586 |
| | | | CCCTCCT | | | | |
| 472505 | 1132 | 1151 | ATCGGCCCCAGGA | 1 | 39179 | 39198 | 4587 |
| | | | GCCCTCC | | | | |
| 472506 | 1134 | 1153 | CCATCGGCCCCAG | 70 | 39181 | 39200 | 4588 |
| | | | GAGCCCT | | | | |
| 472507 | 1135 | 1154 | CCCATCGGCCCCA | 74 | 39182 | 39201 | 4589 |
| | | | GGAGCCC | | | | |
| 472508 | 1137 | 1156 | GACCCATCGGCCC | 44 | 39184 | 39203 | 4590 |
| | | | CAGGAGC | | | | |
| 472509 | 1138 | 1157 | GGACCCATCGGCC | 45 | 39185 | 39204 | 4591 |
| | | | CCAGGAG | | | | |
| 472510 | 1158 | 1177 | GTATTTCTGGAAC | 71 | 39205 | 39224 | 4592 |
| | | | TTCTTCT | | | | |
| 472511 | 1159 | 1178 | TGTATTTCTGGAA | 63 | 39206 | 39225 | 4593 |
| | | | CTTCTTC | | | | |
| 472512 | 1161 | 1180 | AATGTATTTCTGG | 60 | 39208 | 39227 | 4594 |
| | | | AACTTCT | | | | |
| 472513 | 1162 | 1181 | CAATGTATTTCTG | 36 | 39209 | 39228 | 4595 |
| | | | GAACTTC | | | | |
| 472514 | 1164 | 1183 | ACCAATGTATTTC | 72 | 39211 | 39230 | 4596 |
| | | | TGGAACT | | | | |
| 472515 | 1165 | 1184 | AACCAATGTATTT | 68 | 39212 | 39231 | 4597 |
| | | | CTGGAAC | | | | |
| 472516 | 1166 | 1185 | AAACCAATGTATT | 50 | 39213 | 39232 | 4598 |
| | | | TCTGGAA | | | | |
| 472517 | 1167 | 1186 | GAAACCAATGTAT | 65 | 39214 | 39233 | 4599 |
| | | | TTCTGGA | | | | |
| 472518 | 1169 | 1188 | GCGAAACCAATGT | 76 | 39216 | 39235 | 4600 |
| | | | ATTTCTG | | | | |
| 472519 | 1170 | 1189 | GGCGAAACCAATG | 75 | 39217 | 39236 | 4601 |
| | | | TATTTCT | | | | |
| 472520 | 1209 | 1228 | GTCGGAGGAGAAG | 43 | 39256 | 39275 | 4602 |
| | | | AGGCCTC | | | | |
| 472444 | 998 | 1017 | GCATTCTTGCCAG | 89 | 38151 | 38170 | 4526 |
| | | | GCATGGA | | | | |
| 413433 | n/a | n/a | GCCTGGACAAGTC | 87 | 32431 | 32450 | 425 |
| | | | CTGCCCA | | | | |

TABLE 65
Inhibition of DGAT2 mRNA by 5-10-5 MOE
gapmers targeting SEQ ID NO: 1 and 2

| | SEQ | SEQ | | | SEQ | SEQ | |
|---|---|---|---|---|---|---|---|
| | ID | ID | | | ID | ID | |
| | NO: | NO: | | | NO: | NO: | |
| | 1 | 1 | | % | 2 | 2 | SEQ |
| ISIS | Start | Stop | | inhi- | Start | Stop | ID |
| NO | Site | Site | Sequence | bition | Site | Site | NO |
| 472588 | 1558 | 1577 | TTCTTAAAAAAGA | 22 | 41529 | 41548 | 4603 |
| | | | CCTAACA | | | | |
| 472589 | 1560 | 1579 | CCTTCTTAAAAAA | 70 | 41531 | 41550 | 4604 |
| | | | GACCTAA | | | | |
| 472590 | 1561 | 1580 | TCCTTCTTAAAAA | 65 | 41532 | 41551 | 4605 |
| | | | AGACCTA | | | | |
| 472591 | 1562 | 1581 | TTCCTTCTTAAAA | 58 | 41533 | 41552 | 4606 |
| | | | AAGACCT | | | | |
| 472592 | 1564 | 1583 | TTTTCCTTCTTAA | 14 | 41535 | 41554 | 4607 |
| | | | AAAAGAC | | | | |
| 472593 | 1565 | 1584 | TTTTTCCTTCTTA | 9 | 41536 | 41555 | 4608 |
| | | | AAAAAGA | | | | |
| 472594 | 1566 | 1585 | CTTTTTCCTTCTT | 15 | 41537 | 41556 | 4609 |
| | | | AAAAAAG | | | | |
| 472595 | 1568 | 1587 | GACTTTTTCCTTC | 36 | 41539 | 41558 | 4610 |
| | | | TTAAAAA | | | | |
| 472596 | 1569 | 1588 | TGACTTTTTCCTT | 36 | 41540 | 41559 | 4611 |
| | | | CTTAAAA | | | | |
| 472597 | 1570 | 1589 | CTGACTTTTTCCT | 75 | 41541 | 41560 | 4612 |
| | | | TCTTAAA | | | | |
| 472598 | 1571 | 1590 | ACTGACTTTTTCC | 77 | 41542 | 41561 | 4613 |
| | | | TTCTTAA | | | | |
| 472599 | 1615 | 1634 | CACCACCTAGAAC | 70 | 41586 | 41605 | 4614 |
| | | | AGGGCAA | | | | |
| 472600 | 1617 | 1636 | GCCACCACCTAGA | 44 | 41588 | 41607 | 4615 |
| | | | ACAGGGC | | | | |
| 472601 | 1618 | 1637 | AGCCACCACCTAG | 70 | 41589 | 41608 | 4616 |
| | | | AACAGGG | | | | |
| 472602 | 1619 | 1638 | TAGCCACCACCTA | 46 | 41590 | 41609 | 4617 |
| | | | GAACAGG | | | | |
| 472603 | 1621 | 1640 | TTTAGCCACCACC | 51 | 41592 | 41611 | 4618 |
| | | | TAGAACA | | | | |
| 472604 | 1622 | 1641 | ATTTAGCCACCAC | 40 | 41593 | 41612 | 4619 |
| | | | CTAGAAC | | | | |
| 472605 | 1623 | 1642 | GATTTAGCCACCA | 63 | 41594 | 41613 | 4620 |
| | | | CCTAGAA | | | | |
| 472606 | 1624 | 1643 | AGATTTAGCCACC | 54 | 41595 | 41614 | 4621 |
| | | | ACCTAGA | | | | |
| 472607 | 1626 | 1645 | CCAGATTTAGCCA | 74 | 41597 | 41616 | 4622 |
| | | | CCACCTA | | | | |
| 472608 | 1627 | 1646 | CCCAGATTTAGCC | 88 | 41598 | 41617 | 4623 |
| | | | ACCACCT | | | | |
| 472609 | 1628 | 1647 | GCCCAGATTTAGC | 78 | 41599 | 41618 | 4624 |
| | | | CACCACC | | | | |
| 472610 | 1629 | 1648 | GGCCCAGATTTAG | 83 | 41600 | 41619 | 4625 |
| | | | CCACCAC | | | | |
| 472611 | 1631 | 1650 | TAGGCCCAGATTT | 51 | 41602 | 41621 | 4626 |
| | | | AGCCACC | | | | |
| 472612 | 1632 | 1651 | TTAGGCCCAGATT | 14 | 41603 | 41622 | 4627 |
| | | | TAGCCAC | | | | |
| 472613 | 1633 | 1652 | ATTAGGCCCAGAT | 45 | 41604 | 41623 | 4628 |
| | | | TTAGCCA | | | | |
| 472614 | 1634 | 1653 | GATTAGGCCCAGA | 44 | 41605 | 41624 | 4629 |
| | | | TTTAGCC | | | | |
| 472615 | 1636 | 1655 | CAGATTAGGCCCA | 16 | 41607 | 41626 | 4630 |
| | | | GATTTAG | | | | |
| 472616 | 1637 | 1656 | CCAGATTAGGCCC | 40 | 41608 | 41627 | 4631 |
| | | | AGATTTA | | | | |
| 472617 | 1638 | 1657 | CCCAGATTAGGCC | 40 | 41609 | 41628 | 4632 |
| | | | CAGATTT | | | | |
| 472618 | 1639 | 1658 | ACCCAGATTAGGC | 50 | 41610 | 41629 | 4633 |
| | | | CCAGATT | | | | |
| 472619 | 1641 | 1660 | CCACCCAGATTAG | 71 | 41612 | 41631 | 4634 |
| | | | GCCCAGA | | | | |
| 472620 | 1642 | 1661 | GCCACCCAGATTA | 73 | 41613 | 41632 | 4635 |
| | | | GGCCCAG | | | | |
| 472621 | 1643 | 1662 | AGCCACCCAGATT | 65 | 41614 | 41633 | 4636 |
| | | | AGGCCCA | | | | |
| 472622 | 1644 | 1663 | GAGCCACCCAGAT | 26 | 41615 | 41634 | 4637 |
| | | | TAGGCCC | | | | |
| 472623 | 1646 | 1665 | CTGAGCCACCCAG | 23 | 41617 | 41636 | 4638 |
| | | | ATTAGGC | | | | |
| 472624 | 1647 | 1666 | GCTGAGCCACCCA | 24 | 41618 | 41637 | 4639 |
| | | | GATTAGG | | | | |
| 472625 | 1648 | 1667 | AGCTGAGCCACCC | 2 | 41619 | 41638 | 4640 |
| | | | AGATTAG | | | | |
| 472626 | 1649 | 1668 | TAGCTGAGCCACC | 31 | 41620 | 41639 | 4641 |
| | | | CAGATTA | | | | |
| 472627 | 1651 | 1670 | GTTAGCTGAGCCA | 48 | 41622 | 41641 | 4642 |
| | | | CCCAGAT | | | | |
| 472628 | 1652 | 1671 | GGTTAGCTGAGCC | 57 | 41623 | 41642 | 4643 |
| | | | ACCCAGA | | | | |
| 472629 | 1654 | 1673 | GAGGTTAGCTGAG | 66 | 41625 | 41644 | 4644 |
| | | | CCACCCA | | | | |
| 472630 | 1655 | 1674 | AGAGGTTAGCTGA | 51 | 41626 | 41645 | 4645 |
| | | | GCCACCC | | | | |
| 472631 | 1677 | 1696 | GTCACTTCAGGAA | 54 | 41648 | 41667 | 4646 |
| | | | GGGAAGA | | | | |
| 472632 | 1678 | 1697 | TGTCACTTCAGGA | 58 | 41649 | 41668 | 4647 |
| | | | AGGGAAG | | | | |
| 472633 | 1749 | 1768 | AAAAGTGAATCAT | 23 | 41720 | 41739 | 4648 |
| | | | CTAACTG | | | | |
| 472634 | 1750 | 1769 | AAAAAGTGAATCA | 0 | 41721 | 41740 | 4649 |
| | | | TCTAACT | | | | |
| 472635 | 1751 | 1770 | CAAAAAGTGAATC | 2 | 41722 | 41741 | 4650 |
| | | | ATCTAAC | | | | |
| 472636 | 1752 | 1771 | GCAAAAAGTGAAT | 55 | 41723 | 41742 | 4651 |
| | | | CATCTAA | | | | |
| 472637 | 1754 | 1773 | GGGCAAAAAGTGA | 79 | 41725 | 41744 | 4652 |
| | | | ATCATCT | | | | |
| 472638 | 1790 | 1809 | CTTGTATGAGAAG | 58 | 41761 | 41780 | 4653 |
| | | | TGGCTTT | | | | |
| 472639 | 1791 | 1810 | GCTTGTATGAGAA | 49 | 41762 | 41781 | 4654 |
| | | | GTGGCTT | | | | |
| 472640 | 1793 | 1812 | GGGCTTGTATGAG | 67 | 41764 | 41783 | 4655 |
| | | | AAGTGGC | | | | |
| 472641 | 1838 | 1857 | CCTGCAGTTTCAG | 64 | 41809 | 41828 | 4656 |
| | | | GACTAGA | | | | |
| 472642 | 1839 | 1858 | TCCTGCAGTTTCA | 50 | 41810 | 41829 | 4657 |
| | | | GGACTAG | | | | |
| 472643 | 1841 | 1860 | GGTCCTGCAGTTT | 11 | 41812 | 41831 | 4658 |
| | | | CAGGACT | | | | |
| 472644 | 1842 | 1861 | TGGTCCTGCAGTT | 20 | 41813 | 41832 | 4659 |
| | | | TCAGGAC | | | | |
| 472645 | 1843 | 1862 | CTGGTCCTGCAGT | 41 | 41814 | 41833 | 4660 |
| | | | TTCAGGA | | | | |
| 472646 | 1845 | 1864 | AACTGGTCCTGCA | 50 | 41816 | 41835 | 4661 |
| | | | GTTTCAG | | | | |
| 472647 | 1846 | 1865 | AAACTGGTCCTGC | 56 | 41817 | 41836 | 4662 |
| | | | AGTTTCA | | | | |
| 472648 | 1848 | 1867 | AGAAACTGGTCCT | 40 | 41819 | 41838 | 4663 |
| | | | GCAGTTT | | | | |
| 472649 | 1849 | 1868 | GAGAAACTGGTCC | 24 | 41820 | 41839 | 4664 |
| | | | TGCAGTT | | | | |
| 472650 | 1850 | 1869 | AGAGAAACTGGTC | 29 | 41821 | 41840 | 4665 |
| | | | CTGCAGT | | | | |
| 472651 | 1851 | 1870 | CAGAGAAACTGGT | 35 | 41822 | 41841 | 4666 |
| | | | CCTGCAG | | | | |
| 472652 | 1853 | 1872 | GGCAGAGAAACTG | 84 | 41824 | 41843 | 4667 |
| | | | GTCCTGC | | | | |
| 472653 | 1854 | 1873 | TGGCAGAGAAACT | 71 | 41825 | 41844 | 4668 |
| | | | GGTCCTG | | | | |
| 472654 | 1855 | 1874 | TTGGCAGAGAAAC | 63 | 41826 | 41845 | 4669 |
| | | | TGGTCCT | | | | |
| 472655 | 1856 | 1875 | CTTGGCAGAGAAA | 62 | 41827 | 41846 | 4670 |
| | | | CTGGTCC | | | | |
| 472656 | 1858 | 1877 | CCCTTGGCAGAGA | 49 | 41829 | 41848 | 4671 |
| | | | AACTGGT | | | | |
| 472657 | 1859 | 1878 | CCCCTTGGCAGAG | 66 | 41830 | 41849 | 4672 |
| | | | AAACTGG | | | | |
| 472658 | 1861 | 1880 | CTCCCCTTGGCAG | 58 | 41832 | 41851 | 4673 |
| | | | AGAAACT | | | | |
| 472659 | 1862 | 1881 | CCTCCCCTTGGCA | 54 | 41833 | 41852 | 4674 |
| | | | GAGAAAC | | | | |
| 472660 | 1863 | 1882 | TCCTCCCCTTGGC | 49 | 41834 | 41853 | 4675 |
| | | | AGAGAAA | | | | |
| 472661 | 1865 | 1884 | ACTCCTCCCCTTG | 47 | 41836 | 41855 | 4676 |
| | | | GCAGAGA | | | | |
| 472662 | 1866 | 1885 | AACTCCTCCCCTT | 39 | 41837 | 41856 | 4677 |
| | | | GGCAGAG | | | | |
| 472663 | 1867 | 1886 | CAACTCCTCCCCT | 0 | 41838 | 41857 | 4678 |
| | | | TGGCAGA | | | | |
| 472664 | 1869 | 1888 | TCCAACTCCTCCC | 29 | 41840 | 41859 | 4679 |
| | | | CTTGGCA | | | | |
| 413433 | n/a | n/a | GCCTGGACAAGTC | 85 | 32431 | 32450 | 425 |
| | | | CTGCCCA | | | | |

TABLE 66
Inhibition of DGAT2 mRNA by 5-10-5 MOE
gapmers targeting SEQ ID NO: 1 and 2

| | SEQ | SEQ | | | SEQ | SEQ | |
|---|---|---|---|---|---|---|---|
| | ID | ID | | | ID | ID | |
| | NO | NO: | | | NO: | NO: | |
| | 1 | 1 | | % | 2 | 2 | SEQ |
| ISIS | Start | Stop | | inhi- | Start | Stop | ID |
| NO | Site | Site | Sequence | bition | Site | Site | NO |
| 472445 | 1000 | 1019 | CTGCATTCTTGCC | 53 | 38153 | 38172 | 4527 |
| | | | AGGCATG | | | | |
| 472446 | 1001 | 1020 | ACTGCATTCTTGC | 60 | 38154 | 38173 | 4528 |
| | | | CAGGCAT | | | | |
| 472447 | 1003 | 1022 | TGACTGCATTCTT | 52 | 38156 | 38175 | 4529 |
| | | | GCCAGGC | | | | |
| 472448 | 1004 | 1023 | GTGACTGCATTCT | 60 | 38157 | 38176 | 4530 |
| | | | TGCCAGG | | | | |
| 472449 | 1006 | 1025 | GGGTGACTGCATT | 0 | 38159 | 38178 | 4531 |
| | | | CTTGCCA | | | | |
| 472450 | 1007 | 1026 | AGGGTGACTGCAT | 62 | 38160 | 38179 | 4532 |
| | | | TCTTGCC | | | | |
| 472451 | 1008 | 1027 | CAGGGTGACTGCA | 43 | 38161 | 38180 | 4533 |
| | | | TTCTTGC | | | | |
| 472452 | 1010 | 1029 | CGCAGGGTGACTG | 25 | 38163 | 38182 | 4534 |
| | | | CATTCTT | | | | |
| 472453 | 1011 | 1030 | CCGCAGGGTGACT | 45 | 38164 | 38183 | 4535 |
| | | | GCATTCT | | | | |
| 472454 | 1013 | 1032 | TTCCGCAGGGTGA | 16 | 38166 | 38185 | 4536 |
| | | | CTGCATT | | | | |
| 472455 | 1014 | 1033 | GTTCCGCAGGGTG | 29 | 38167 | 38186 | 4537 |
| | | | ACTGCAT | | | | |
| 472456 | 1015 | 1034 | GGTTCCGCAGGGT | 62 | 38168 | 38187 | 4538 |
| | | | GACTGCA | | | | |
| 472457 | 1017 | 1036 | GCGGTTCCGCAGG | 33 | 38170 | 38189 | 4539 |
| | | | GTGACTG | | | | |
| 472458 | 1018 | 1037 | TGCGGTTCCGCAG | 57 | 38171 | 38190 | 4540 |
| | | | GGTGACT | | | | |
| 472459 | 1020 | 1039 | CTTGCGGTTCCGC | 39 | 38173 | 38192 | 4541 |
| | | | AGGGTGA | | | | |
| 472460 | 1021 | 1040 | CCTTGCGGTTCCG | 25 | 38174 | 38193 | 4542 |
| | | | CAGGGTG | | | | |
| 472461 | 1023 | 1042 | GCCCTTGCGGTTC | 9 | 38176 | 38195 | 4543 |
| | | | CGCAGGG | | | | |
| 472462 | 1024 | 1043 | AGCCCTTGCGGTT | 32 | 38177 | 38196 | 4544 |
| | | | CCGCAGG | | | | |
| 472463 | 1026 | 1045 | AAAGCCCTTGCGG | 46 | 38179 | 38198 | 4545 |
| | | | TTCCGCA | | | | |
| 472464 | 1027 | 1046 | CAAAGCCCTTGCG | 48 | 38180 | 38199 | 4546 |
| | | | GTTCCGC | | | | |
| 472465 | 1029 | 1048 | CACAAAGCCCTTG | 8 | 38182 | 38201 | 4547 |
| | | | CGGTTCC | | | | |
| 472466 | 1030 | 1049 | TCACAAAGCCCTT | 0 | 38183 | 38202 | 4548 |
| | | | GCGGTTC | | | | |
| 472467 | 1032 | 1051 | TTTCACAAAGCCC | 0 | 38185 | 38204 | 4549 |
| | | | TTGCGGT | | | | |
| 472468 | 1033 | 1052 | GTTTCACAAAGCC | 18 | 38186 | 38205 | 4550 |
| | | | CTTGCGG | | | | |
| 472469 | 1035 | 1054 | CAGTTTCACAAAG | 0 | 38188 | 38207 | 4551 |
| | | | CCCTTGC | | | | |
| 472470 | 1036 | 1055 | CCAGTTTCACAAA | 23 | 38189 | 38208 | 4552 |
| | | | GCCCTTG | | | | |
| 472471 | 1038 | 1057 | GGCCAGTTTCACA | 2 | 38191 | 38210 | 4553 |
| | | | AAGCCCT | | | | |
| 472472 | 1039 | 1058 | GGGCCAGTTTCAC | 0 | 38192 | 38211 | 4554 |
| | | | AAAGCCC | | | | |
| 472473 | 1041 | 1060 | CAGGGCCAGTTTC | 0 | 38194 | 38213 | 4555 |
| | | | ACAAAGC | | | | |
| 472474 | 1042 | 1061 | GCAGGGCCAGTTT | 10 | 38195 | 38214 | 4556 |
| | | | CACAAAG | | | | |
| 472475 | 1089 | 1108 | TTCATTCTCTCCA | 47 | 39136 | 39155 | 4557 |
| | | | AAGGAGT | | | | |
| 472476 | 1090 | 1109 | CTTCATTCTCTCC | 65 | 39137 | 39156 | 4558 |
| | | | AAAGGAG | | | | |
| 472477 | 1092 | 1111 | CACTTCATTCTCT | 51 | 39139 | 39158 | 4559 |
| | | | CCAAAGG | | | | |
| 472478 | 1093 | 1112 | ACACTTCATTCTC | 68 | 39140 | 39159 | 4560 |
| | | | TCCAAAG | | | | |
| 472479 | 1094 | 1113 | TACACTTCATTCT | 41 | 39141 | 39160 | 4561 |
| | | | CTCCAAA | | | | |
| 472480 | 1096 | 1115 | TGTACACTTCATT | 85 | 39143 | 39162 | 4562 |
| | | | CTCTCCA | | | | |
| 472481 | 1097 | 1116 | TTGTACACTTCAT | 72 | 39144 | 39163 | 4563 |
| | | | TCTCTCC | | | | |
| 472482 | 1099 | 1118 | GCTTGTACACTTC | 80 | 39146 | 39165 | 4564 |
| | | | ATTCTCT | | | | |
| 472483 | 1100 | 1119 | TGCTTGTACACTT | 64 | 39147 | 39166 | 4565 |
| | | | CATTCTC | | | | |
| 472484 | 1102 | 1121 | CCTGCTTGTACAC | 75 | 39149 | 39168 | 4566 |
| | | | TTCATTC | | | | |
| 472485 | 1103 | 1122 | ACCTGCTTGTACA | 67 | 39150 | 39169 | 4567 |
| | | | CTTCATT | | | | |
| 472486 | 1104 | 1123 | CACCTGCTTGTAC | 88 | 39151 | 39170 | 4568 |
| | | | ACTTCAT | | | | |
| 472487 | 1106 | 1125 | ATCACCTGCTTGT | 59 | 39153 | 39172 | 4569 |
| | | | ACACTTC | | | | |
| 472488 | 1107 | 1126 | GATCACCTGCTTG | 70 | 39154 | 39173 | 4570 |
| | | | TACACTT | | | | |
| 472489 | 1109 | 1128 | AAGATCACCTGCT | 28 | 39156 | 39175 | 4571 |
| | | | TGTACAC | | | | |
| 472490 | 1110 | 1129 | GAAGATCACCTGC | 53 | 39157 | 39176 | 4572 |
| | | | TTGTACA | | | | |
| 472491 | 1112 | 1131 | TCGAAGATCACCT | 52 | 39159 | 39178 | 4573 |
| | | | GCTTGTA | | | | |
| 472492 | 1113 | 1132 | CTCGAAGATCACC | 49 | 39160 | 39179 | 4574 |
| | | | TGCTTGT | | | | |
| 472493 | 1115 | 1134 | TCCTCGAAGATCA | 46 | 39162 | 39181 | 4575 |
| | | | CCTGCTT | | | | |
| 472494 | 1116 | 1135 | CTCCTCGAAGATC | 55 | 39163 | 39182 | 4576 |
| | | | ACCTGCT | | | | |
| 472495 | 1118 | 1137 | CCCTCCTCGAAGA | 54 | 39165 | 39184 | 4577 |
| | | | TCACCTG | | | | |
| 472496 | 1119 | 1138 | GCCCTCCTCGAAG | 74 | 39166 | 39185 | 4578 |
| | | | ATCACCT | | | | |
| 472497 | 1121 | 1140 | GAGCCCTCCTCGA | 54 | 39168 | 39187 | 4579 |
| | | | AGATCAC | | | | |
| 472498 | 1122 | 1141 | GGAGCCCTCCTCG | 68 | 39169 | 39188 | 4580 |
| | | | AAGATCA | | | | |
| 472499 | 1124 | 1143 | CAGGAGCCCTCCT | 37 | 39171 | 39190 | 4581 |
| | | | CGAAGAT | | | | |
| 472500 | 1125 | 1144 | CCAGGAGCCCTCC | 41 | 39172 | 39191 | 4582 |
| | | | TCGAAGA | | | | |
| 472501 | 1127 | 1146 | CCCCAGGAGCCCT | 34 | 39174 | 39193 | 4583 |
| | | | CCTCGAA | | | | |
| 472502 | 1128 | 1147 | GCCCCAGGAGCCC | 17 | 39175 | 39194 | 4584 |
| | | | TCCTCGA | | | | |
| 472503 | 1130 | 1149 | CGGCCCCAGGAGC | 0 | 39177 | 39196 | 4585 |
| | | | CCTCCTC | | | | |
| 472504 | 1131 | 1150 | TCGGCCCCAGGAG | 16 | 39178 | 39197 | 4586 |
| | | | CCCTCCT | | | | |
| 472505 | 1132 | 1151 | ATCGGCCCCAGGA | 0 | 39179 | 39198 | 4587 |
| | | | GCCCTCC | | | | |
| 472506 | 1134 | 1153 | CCATCGGCCCCAG | 64 | 39181 | 39200 | 4588 |
| | | | GAGCCCT | | | | |
| 472507 | 1135 | 1154 | CCCATCGGCCCCA | 55 | 39182 | 39201 | 4589 |
| | | | GGAGCCC | | | | |
| 472508 | 1137 | 1156 | GACCCATCGGCCC | 34 | 39184 | 39203 | 4590 |
| | | | CAGGAGC | | | | |
| 472509 | 1138 | 1157 | GGACCCATCGGCC | 50 | 39185 | 39204 | 4591 |
| | | | CCAGGAG | | | | |
| 472510 | 1158 | 1177 | GTATTTCTGGAAC | 64 | 39205 | 39224 | 4592 |
| | | | TTCTTCT | | | | |
| 472511 | 1159 | 1178 | TGTATTTCTGGAA | 49 | 39206 | 39225 | 4593 |
| | | | CTTCTTC | | | | |
| 472512 | 1161 | 1180 | AATGTATTTCTGG | 40 | 39208 | 39227 | 4594 |
| | | | AACTTCT | | | | |
| 472513 | 1162 | 1181 | CAATGTATTTCTG | 4 | 39209 | 39228 | 4595 |
| | | | GAACTTC | | | | |
| 472514 | 1164 | 1183 | ACCAATGTATTTC | 41 | 39211 | 39230 | 4596 |
| | | | TGGAACT | | | | |
| 472515 | 1165 | 1184 | AACCAATGTATTT | 41 | 39212 | 39231 | 4597 |
| | | | CTGGAAC | | | | |
| 472516 | 1166 | 1185 | AAACCAATGTATT | 34 | 39213 | 39232 | 4598 |
| | | | TCTGGAA | | | | |
| 472517 | 1167 | 1186 | GAAACCAATGTAT | 51 | 39214 | 39233 | 4599 |
| | | | TTCTGGA | | | | |
| 472518 | 1169 | 1188 | GCGAAACCAATGT | 54 | 39216 | 39235 | 4600 |
| | | | ATTTCTG | | | | |
| 472519 | 1170 | 1189 | GGCGAAACCAATG | 59 | 39217 | 39236 | 4601 |
| | | | TATTTCT | | | | |
| 472520 | 1209 | 1228 | GTCGGAGGAGAAG | 17 | 39256 | 39275 | 4602 |
| | | | AGGCCTC | | | | |
| 472444 | 998 | 1017 | GCATTCTTGCCAG | 77 | 38151 | 38170 | 4526 |
| | | | GCATGGA | | | | |
| 413433 | n/a | n/a | GCCTGGACAAGTC | 76 | 32431 | 32450 | 425 |
| | | | CTGCCCA | | | | |

### Example 6: Dose-Dependent Antisense Inhibition of Human DGAT2 in HepG2 Cells by MOE Gapmers

[0462] Gapmers from the studies described in the Examples above exhibiting significant in vitro inhibition of DGAT2 mRNA were selected and tested at various doses in HepG2 cells. The antisense oligonucleotides were tested in a series of experiments that had similar culture conditions. Previously disclosed oligonucleotides, ISIS 21316, ISIS 217317, ISIS 217328, ISIS 369185, ISIS 366714, ISIS 366730, ISIS 366746, and ISIS 369241 from earlier published application, WO 2005/019418, were included in the assay. The results for each experiment are presented in separate tables shown below. Cells were plated at a density of 10,000 cells per well and transfected using Lipofectin reagent with 6.25 nM, 12.5 nM, 25.0 nM, 50 nM, 100 nM, or 200.0 nM concentrations of antisense oligonucleotide, as specified in the Tables below. After a treatment period of approximately 16 hours, RNA was isolated from the cells and DGAT2 mRNA levels were measured by quantitative real-time PCR. Human primer probe set RTS2367 was used to measure mRNA levels. DGAT2 mRNA levels were adjusted according to total RNA content, as measured by RIBOGREEN®. Results are presented as percent inhibition of DGAT2, relative to untreated control cells. ‘0’ indicates that the mRNA levels were not inhibited. ‘n.d.’ indicates that the inhibition levels were not recorded.

[0463] The half maximal inhibitory concentration (IC₅₀) of each oligonucleotide is also presented. DGAT2 mRNA levels were significantly reduced in a dose-dependent manner in antisense oligonucleotide treated cells. The results also demonstrate that several newly designed oligonucleotides had greater efficacy than the previously disclosed oligonucleotides.

TABLE 67

| | 6.25 | 12.5 | 25.0 | 50.0 | 100.0 | 200.0 | IC₅₀ |
|---|---|---|---|---|---|---|---|
| ISIS No | nM | nM | nM | nM | nM | nM | (nM) |
| 217316 | 7 | 7 | 27 | 47 | 68 | 63 | 55 |
| 217317 | 3 | 12 | 32 | 50 | 75 | 84 | 44 |
| 369185 | 17 | 12 | 34 | 63 | 78 | 81 | 42 |
| 381726 | 4 | 30 | 44 | 56 | 76 | 83 | 37 |
| 411874 | 15 | 31 | 27 | 54 | 66 | 66 | 40 |
| 411899 | 5 | 22 | 31 | 57 | 74 | 87 | 39 |
| 411901 | 0 | 6 | 24 | 46 | 66 | 65 | 58 |
| 411905 | 6 | 30 | 29 | 58 | 73 | 76 | 34 |
| 411912 | 8 | 24 | 31 | 56 | 79 | 89 | 35 |
| 411941 | 11 | 22 | 30 | 59 | 77 | 82 | 35 |

TABLE 68

| | 6.25 | 12.5 | 25.0 | 50.0 | 100.0 | 200.0 | IC₅₀ |
|---|---|---|---|---|---|---|---|
| ISIS No | nM | nM | nM | nM | nM | nM | (nM) |
| 366714 | 7 | 8 | 42 | 67 | 79 | 82 | 33 |
| 366730 | 0 | 18 | 33 | 72 | 84 | 91 | 43 |
| 411944 | 2 | 14 | 46 | 65 | 82 | 93 | 30 |
| 411945 | 14 | 21 | 51 | 68 | 86 | n.d. | 24 |
| 411950 | 6 | 5 | 28 | 66 | 84 | n.d. | 29 |
| 413176 | 7 | 16 | 24 | 58 | 78 | 88 | 38 |
| 413192 | 0 | 6 | 30 | 62 | 80 | 80 | 57 |
| 413200 | 2 | 18 | 20 | 60 | 78 | 77 | 36 |
| 413213 | 9 | 12 | 34 | 55 | 84 | 90 | 45 |
| 413226 | 3 | 22 | 13 | 36 | 72 | 87 | 41 |

TABLE 69

| | 6.25 | 12.5 | 25.0 | 50.0 | 100.0 | 200.0 | IC₅₀ |
|---|---|---|---|---|---|---|---|
| ISIS No | nM | nM | nM | nM | nM | nM | (nM) |
| 366746 | 5 | 7 | 21 | 32 | 62 | 77 | 66 |
| 369241 | 0 | 4 | 10 | 35 | 56 | 63 | 106 |
| 413198 | 10 | 16 | 24 | 53 | 72 | 73 | 51 |
| 413214 | 1 | 17 | 43 | 61 | 81 | 77 | 34 |
| 413232 | 8 | 23 | 33 | 60 | 78 | 82 | 35 |
| 413236 | 0 | 12 | 3 | 52 | 71 | 72 | 47 |
| 413253 | 6 | 7 | 27 | 59 | 72 | 75 | 64 |
| 413258 | 0 | 12 | 27 | 46 | 78 | 77 | 62 |
| 413266 | 0 | 0 | 21 | 48 | 76 | 75 | 52 |
| 413284 | 4 | 0 | 22 | 45 | 57 | 65 | 78 |

TABLE 70

| | 6.25 | 12.5 | 25.0 | 50.0 | 100.0 | 200.0 | IC₅₀ |
|---|---|---|---|---|---|---|---|
| ISIS No | nM | nM | nM | nM | nM | nM | (nM) |
| 217328 | 4 | 15 | 31 | 50 | 64 | 72 | 62 |
| 413243 | 0 | 10 | 28 | 50 | 69 | 77 | 66 |
| 413351 | 4 | 16 | 16 | 39 | 56 | 69 | 51 |
| 413356 | 16 | 12 | 23 | 51 | 63 | 69 | 34 |
| 413364 | 0 | 0 | 21 | 41 | 58 | 53 | 52 |
| 413399 | 0 | 3 | 23 | 35 | 60 | 58 | 78 |
| 413413 | 1 | 0 | 30 | 50 | 71 | 77 | 64 |
| 413422 | 0 | 0 | 8 | 41 | 63 | 70 | 62 |
| 413433 | 5 | 5 | 20 | 55 | 77 | 82 | 47 |
| 413441 | 2 | 5 | 26 | 50 | 70 | 79 | 106 |
| 413446 | 0 | 0 | 10 | 41 | 63 | 78 | 35 |

TABLE 71

| | 6.25 | 12.5 | 25.0 | 50.0 | 100.0 | 200.0 | IC₅₀ |
|---|---|---|---|---|---|---|---|
| ISIS No | nM | nM | nM | nM | nM | nM | (nM) |
| 217317 | 0 | 0 | 11 | 34 | 64 | 84 | 77 |
| 366730 | 0 | 15 | 33 | 61 | 87 | 91 | 45 |
| 381726 | 1 | 11 | 31 | 51 | 71 | 83 | 48 |
| 411899 | 6 | 0 | 25 | 39 | 70 | 89 | 55 |
| 411912 | 0 | 0 | 13 | 58 | 77 | 87 | 40 |
| 411944 | 7 | 21 | 32 | 67 | 76 | 87 | 42 |
| 413176 | 0 | 12 | 20 | 54 | 89 | 88 | 46 |
| 413232 | 16 | 10 | 30 | 60 | 79 | 90 | 31 |
| 413433 | 15 | 17 | 37 | 71 | 84 | 87 | 24 |
| 413446 | 0 | 0 | 44 | 73 | 77 | 86 | 47 |

### Example 7: Dose-Dependent Antisense Inhibition of Human DGAT2 in HepG2 Cells by MOE Gapmers

[0464] Gapmers from the studies described in the Examples above exhibiting significant in vitro inhibition of DGAT2 mRNA were selected and tested at various doses in HepG2 cells. The antisense oligonucleotides were tested in a series of experiments that had similar culture conditions. Previously disclosed oligonucleotides from earlier published application, WO 2005/019418, were included in the assay. The results for each experiment are presented in separate tables shown below.

### Study 1

[0465] Cells were plated at a density of 10,000 cells per well and transfected using Lipofectin reagent with 18.75 nM, 37.5 nM, 75.0 nM, or 150.0 nM concentrations of antisense oligonucleotide, as specified in the Tables below. After a treatment period of approximately 16 hours, RNA was isolated from the cells and DGAT2 mRNA levels were measured by quantitative real-time PCR. Human primer probe set RTS2988_MGB was used to measure mRNA levels. DGAT2 mRNA levels were adjusted according to total RNA content, as measured by RIBOGREEN®. Results are presented as percent inhibition of DGAT2, relative to untreated control cells. ‘0’ indicates that the mRNA levels were not inhibited.

[0466] The half maximal inhibitory concentration (IC₅₀) of each oligonucleotide is also presented. DGAT2 mRNA levels were significantly reduced in a dose-dependent manner in antisense oligonucleotide treated cells.

TABLE 72

| | | 18.75 | 37.5 | 75.0 | 150.0 | IC₅₀ |
|---|---|---|---|---|---|---|
| ISIS No | Motif | nM | nM | nM | nM | (nM) |
| 217328 | 5-10-5 | 27 | 44 | 62 | 73 | 47 |
| 366730 | 5-10-5 | 27 | 36 | 61 | 77 | 48 |
| 411944 | 5-10-5 | 19 | 38 | 48 | 69 | 67 |
| 411945 | 5-10-5 | 14 | 26 | 45 | 61 | 93 |
| 413253 | 5-10-5 | 24 | 34 | 50 | 68 | 73 |
| 413433 | 5-10-5 | 28 | 39 | 56 | 68 | 58 |
| 423440 | 5-10-5 | 18 | 39 | 53 | 70 | 67 |
| 423441 | 5-10-5 | 23 | 36 | 54 | 66 | 63 |
| 423444 | 5-10-5 | 15 | 32 | 53 | 69 | 71 |
| 423447 | 5-10-5 | 24 | 36 | 55 | 71 | 60 |
| 423463 | 5-10-5 | 23 | 39 | 59 | 73 | 56 |
| 423489 | 3-14-3 | 21 | 32 | 55 | 73 | 60 |
| 423490 | 3-14-3 | 27 | 32 | 51 | 60 | 76 |
| 423498 | 3-14-3 | 19 | 38 | 56 | 77 | 59 |
| 423499 | 5-10-5 | 23 | 37 | 59 | 77 | 53 |
| 423523 | 3-14-3 | 25 | 41 | 60 | 73 | 56 |
| 423524 | 3-14-3 | 24 | 37 | 62 | 75 | 54 |
| 423601 | 2-13-5 | 28 | 38 | 58 | 75 | 51 |

TABLE 73

| | | 18.75 | 37.5 | 75.0 | 150.0 | IC₅₀ |
|---|---|---|---|---|---|---|
| ISIS No | Motif | nM | nM | nM | nM | (nM) |
| 217317 | 5-10-5 | 4 | 23 | 39 | 61 | 104 |
| 217328 | 5-10-5 | 20 | 33 | 54 | 67 | 73 |
| 411899 | 5-10-5 | 11 | 34 | 51 | 66 | 74 |
| 413214 | 5-10-5 | 8 | 32 | 52 | 68 | 73 |
| 413232 | 5-10-5 | 17 | 26 | 50 | 70 | 71 |
| 423452 | 5-10-5 | 12 | 26 | 45 | 65 | 88 |
| 423453 | 5-10-5 | 15 | 33 | 46 | 67 | 76 |
| 423458 | 5-10-5 | 14 | 31 | 49 | 70 | 74 |
| 423459 | 5-10-5 | 17 | 29 | 61 | 73 | 64 |
| 423464 | 5-10-5 | 19 | 33 | 52 | 64 | 74 |
| 423507 | 3-14-3 | 15 | 32 | 52 | 68 | 73 |
| 423508 | 3-14-3 | 14 | 37 | 48 | 69 | 73 |
| 423526 | 3-14-3 | 13 | 23 | 41 | 58 | 109 |
| 423527 | 3-14-3 | 13 | 28 | 51 | 58 | 102 |
| 423565 | 2-13-5 | 17 | 27 | 48 | 69 | 80 |
| 423567 | 2-13-5 | 0 | 29 | 53 | 74 | 79 |
| 423585 | 2-13-5 | 12 | 25 | 42 | 64 | 94 |
| 423595 | 2-13-5 | 12 | 26 | 47 | 69 | 81 |
| 423606 | 2-13-5 | 13 | 27 | 55 | 71 | 68 |

[0467] The same gapmers were also tested at various doses in HepG2 cells using electroporation. Cells were plated at a density of 20,000 cells per well and transfected using electroporation with 2.5 μM, 5.0 μM, 10.0 μM, or 20.0 μM concentrations of antisense oligonucleotide, as specified in the Tables below. After a treatment period of approximately 16 hours, RNA was isolated from the cells and DGAT2 mRNA levels were measured by quantitative real-time PCR. Human primer probe set RTS2988_MGB was used to measure mRNA levels. DGAT2 mRNA levels were adjusted according to total RNA content, as measured by RIBOGREEN®. Results are presented as percent inhibition of DGAT2, relative to untreated control cells. ‘0’ indicates that the mRNA levels were not inhibited.

[0468] The half maximal inhibitory concentration (IC₅₀) of each oligonucleotide is also presented. DGAT2 mRNA levels were significantly reduced in a dose-dependent manner in antisense oligonucleotide treated cells.

TABLE 74

| | | 2.5 | 5.0 | 10.0 | 20.0 | IC₅₀ |
|---|---|---|---|---|---|---|
| ISIS No | Motif | μM | μM | μM | μM | (μM) |
| 217328 | 5-10-5 | 55 | 70 | 85 | 94 | 2 |
| 366730 | 5-10-5 | 38 | 51 | 78 | 89 | 5 |
| 411944 | 5-10-5 | 30 | 32 | 48 | 73 | 10 |
| 411945 | 5-10-5 | 31 | 26 | 48 | 69 | 11 |
| 413253 | 5-10-5 | 39 | 51 | 77 | 84 | 4 |
| 413433 | 5-10-5 | 72 | 81 | 82 | 85 | <2.5 |
| 423440 | 5-10-5 | 30 | 54 | 65 | 91 | 5 |
| 423441 | 5-10-5 | 41 | 47 | 60 | 90 | 6 |
| 423444 | 5-10-5 | 19 | 46 | 70 | 81 | 6 |
| 423447 | 5-10-5 | 25 | 49 | 76 | 79 | 5 |
| 423463 | 5-10-5 | 59 | 79 | 85 | 86 | 2 |
| 423489 | 3-14-3 | 33 | 56 | 72 | 92 | 5 |
| 423490 | 3-14-3 | 17 | 25 | 53 | 82 | 9 |
| 423498 | 3-14-3 | 30 | 41 | 59 | 88 | 7 |
| 423499 | 5-10-5 | 27 | 26 | 63 | 78 | 10 |
| 423523 | 3-14-3 | 45 | 48 | 81 | 89 | 5 |
| 423524 | 3-14-3 | 35 | 59 | 84 | 92 | 4 |
| 423601 | 2-13-5 | 44 | 55 | 87 | 90 | 4 |

TABLE 75

| | | 18.75 | 37.5 | 75.0 | 150.0 | IC₅₀ |
|---|---|---|---|---|---|---|
| ISIS No | Motif | nM | nM | nM | nM | (nM) |
| 217317 | 5-10-5 | 16 | 33 | 63 | 65 | 7 |
| 217328 | 5-10-5 | 32 | 56 | 79 | 91 | 4 |
| 411899 | 5-10-5 | 28 | 38 | 74 | 87 | 5 |
| 413214 | 5-10-5 | 37 | 46 | 65 | 91 | 6 |
| 413232 | 5-10-5 | 18 | 20 | 43 | 78 | 11 |
| 423452 | 5-10-5 | 14 | 47 | 73 | 85 | 6 |
| 423453 | 5-10-5 | 52 | 70 | 83 | 93 | 2 |
| 423458 | 5-10-5 | 28 | 31 | 65 | 87 | 8 |
| 423459 | 5-10-5 | 24 | 33 | 57 | 88 | 8 |
| 423464 | 5-10-5 | 68 | 81 | 86 | 88 | 1 |
| 423507 | 3-14-3 | 29 | 42 | 71 | 89 | 5 |
| 423508 | 3-14-3 | 16 | 38 | 53 | 83 | 7 |
| 423526 | 3-14-3 | 48 | 73 | 81 | 90 | 3 |
| 423527 | 3-14-3 | 27 | 51 | 68 | 85 | 6 |
| 423565 | 2-13-5 | 13 | 35 | 66 | 84 | 7 |
| 423567 | 2-13-5 | 27 | 42 | 61 | 91 | 7 |
| 423585 | 2-13-5 | 24 | 28 | 67 | 91 | 7 |
| 423595 | 2-13-5 | 12 | 25 | 50 | 78 | 10 |
| 423606 | 2-13-5 | 42 | 59 | 74 | 85 | 3 |

### Study 2

[0469] Cells were plated at a density of 35,000 cells per well and transfected using electroporation with 0.22 μM, 0.67 μM, 2.0 μM, 6.0 μM, or 18.0 μM concentrations of antisense oligonucleotide, as specified in the Tables below. After a treatment period of approximately 16 hours, RNA was isolated from the cells and DGAT2 mRNA levels were measured by quantitative real-time PCR. Human primer probe set RTS2977_MGB (forward sequence ACTGGGCGGGCTTCATATT, designated herein as SEQ ID NO: 10; reverse sequence CCCGGAGTAGGCGGCTAT, designated herein as SEQ ID NO: 11; probe sequence AGCCATGAAGACCC, designated herein as SEQ ID NO: 12) was used to measure mRNA levels. DGAT2 mRNA levels were adjusted according to total RNA content, as measured by RIBOGREEN®. Results are presented as percent inhibition of DGAT2, relative to untreated control cells. ‘0’ indicates that the mRNA levels were not inhibited.

[0470] The half maximal inhibitory concentration (IC₅₀) of each oligonucleotide is also presented. DGAT2 mRNA levels were significantly reduced in a dose-dependent manner in antisense oligonucleotide treated cells.

TABLE 76

| | | 0.22 | 0.67 | 2.0 | 6.0 | 18.0 | IC₅₀ |
|---|---|---|---|---|---|---|---|
| ISIS No | Motif | μM | μM | μM | μM | μM | (μM) |
| 217328 | 5-10-5 | 0 | 17 | 52 | 83 | 96 | 2.1 |
| 366730 | 5-10-5 | 0 | 0 | 27 | 72 | 93 | 3.9 |
| 413433 | 5-10-5 | 0 | 10 | 58 | 84 | 93 | 2.2 |
| 423453 | 5-10-5 | 14 | 21 | 53 | 86 | 94 | 1.9 |
| 423459 | 5-10-5 | 0 | 18 | 36 | 68 | 92 | 3.0 |
| 423463 | 5-10-5 | 16 | 15 | 50 | 76 | 80 | 2.7 |
| 423464 | 5-10-5 | 0 | 29 | 56 | 86 | 92 | 1.6 |
| 423489 | 3-14-3 | 0 | 0 | 37 | 63 | 91 | 3.8 |
| 423498 | 3-14-3 | 0 | 0 | 21 | 56 | 82 | 5.3 |
| 423499 | 3-14-3 | 0 | 6 | 26 | 62 | 88 | 4.1 |
| 423523 | 3-14-3 | 0 | 0 | 34 | 69 | 95 | 4.2 |
| 423524 | 3-14-3 | 0 | 6 | 15 | 62 | 90 | 4.4 |
| 423526 | 3-14-3 | 5 | 7 | 45 | 87 | 94 | 2.6 |
| 423601 | 2-13-5 | 0 | 0 | 31 | 65 | 89 | 4.3 |
| 423606 | 2-13-5 | 58 | 19 | 43 | 72 | 94 | 2.6 |

### Study 3

[0471] Cells were plated at a density of 10,000 cells per well and transfected using Lipofectin reagent with 12.5 nM, 25.0 nM, 50.0 nM, 100.0 nM, or 200.0 nM concentrations of antisense oligonucleotide, as specified in the Tables below. After a treatment period of approximately 16 hours, RNA was isolated from the cells and DGAT2 mRNA levels were measured by quantitative real-time PCR. Human primer probe set RTS2988_MGB was used to measure mRNA levels. DGAT2 mRNA levels were adjusted according to total RNA content, as measured by RIBOGREEN®. Results are presented as percent inhibition of DGAT2, relative to untreated control cells. ‘0’ indicates that the mRNA levels were not inhibited.

[0472] The half maximal inhibitory concentration (IC₅₀) of each oligonucleotide is also presented. DGAT2 mRNA levels were significantly reduced in a dose-dependent manner in antisense oligonucleotide treated cells.

TABLE 77

| | | 0.22 | 0.67 | 2.0 | 6.0 | 18.0 | IC₅₀ |
|---|---|---|---|---|---|---|---|
| ISIS No | Motif | μM | μM | μM | μM | μM | (μM) |
| 217328 | 5-10-5 | 25 | 31 | 58 | 71 | 85 | 38 |
| 366730 | 5-10-5 | 21 | 34 | 53 | 74 | 90 | 44 |
| 413433 | 5-10-5 | 23 | 40 | 63 | 75 | 86 | 37 |
| 423453 | 5-10-5 | 0 | 2 | 33 | 61 | 72 | 90 |
| 423459 | 5-10-5 | 16 | 22 | 44 | 65 | 79 | 64 |
| 423463 | 5-10-5 | 6 | 24 | 46 | 63 | 82 | 62 |
| 423464 | 5-10-5 | 20 | 28 | 45 | 64 | 79 | 60 |
| 423489 | 3-14-3 | 15 | 28 | 57 | 75 | 84 | 42 |
| 423498 | 3-14-3 | 8 | 21 | 52 | 71 | 85 | 49 |
| 423499 | 3-14-3 | 13 | 23 | 43 | 65 | 84 | 62 |
| 423523 | 3-14-3 | 25 | 38 | 58 | 72 | 86 | 38 |
| 423524 | 3-14-3 | 16 | 32 | 56 | 66 | 83 | 52 |
| 423526 | 3-14-3 | 28 | 33 | 51 | 54 | 68 | 71 |
| 423601 | 2-13-5 | 13 | 30 | 54 | 71 | 84 | 49 |
| 423606 | 2-13-5 | 12 | 36 | 52 | 69 | 80 | 47 |

### Study 4

[0473] Cells were plated at a density of 10,000 cells per well and transfected using Lipofectin reagent with 12.5 nM, 25.0 nM, 50.0 nM, 100.0 nM, or 200.0 nM concentrations of antisense oligonucleotide, as specified in the Tables below. After a treatment period of approximately 16 hours, RNA was isolated from the cells and DGAT2 mRNA levels were measured by quantitative real-time PCR. Human primer probe set RTS2988_MGB was used to measure mRNA levels. DGAT2 mRNA levels were adjusted according to total RNA content, as measured by RIBOGREEN®. Results are presented as percent inhibition of DGAT2, relative to untreated control cells. ‘0’ indicates that the mRNA levels were not inhibited.

[0474] The half maximal inhibitory concentration (IC₅₀) of each oligonucleotide is also presented. DGAT2 mRNA levels were significantly reduced in a dose-dependent manner in antisense oligonucleotide treated cells.

TABLE 78

| | | 0.22 | 0.67 | 2.0 | 6.0 | 18.0 | IC₅₀ |
|---|---|---|---|---|---|---|---|
| ISIS No | Motif | μM | μM | μM | μM | μM | (μM) |
| 217328 | 5-10-5 | 42 | 54 | 60 | 88 | 95 | 2 |
| 366730 | 5-10-5 | 26 | 44 | 61 | 85 | 95 | 3 |
| 413433 | 5-10-5 | 55 | 69 | 76 | 83 | 87 | <1.25 |
| 423453 | 5-10-5 | 40 | 62 | 78 | 91 | 95 | 2 |
| 423459 | 5-10-5 | 19 | 25 | 47 | 79 | 92 | 5 |
| 423463 | 5-10-5 | 51 | 52 | 83 | 86 | 90 | <1.25 |
| 423464 | 5-10-5 | 42 | 67 | 82 | 90 | 89 | 2 |
| 423489 | 3-14-3 | 8 | 19 | 40 | 77 | 96 | 5 |
| 423498 | 3-14-3 | 5 | 1 | 20 | 51 | 89 | 9 |
| 423499 | 3-14-3 | 23 | 24 | 35 | 71 | 95 | 5 |
| 423523 | 3-14-3 | 19 | 42 | 67 | 87 | 93 | 3 |
| 423524 | 3-14-3 | 38 | 53 | 71 | 90 | 95 | 2 |
| 423526 | 3-14-3 | 33 | 59 | 78 | 91 | 93 | 2 |
| 423601 | 2-13-5 | 22 | 45 | 72 | 88 | 93 | 3 |
| 423606 | 2-13-5 | 30 | 46 | 64 | 83 | 86 | 3 |

### Study 5

[0475] Cells were plated at a density of 20,000 cells per well and transfected using electroporation with 12.5 μM, 25.0 μM, 50.0 μM, 100.0 μM, or 200.0 μM concentrations of antisense oligonucleotide, as specified in the Tables below. After a treatment period of approximately 16 hours, RNA was isolated from the cells and DGAT2 mRNA levels were measured by quantitative real-time PCR. Human primer probe set RTS2988_MGB (forward sequence AACTGGCCCTGCGTCATG, designated herein as SEQ ID NO: 7; reverse sequence CTTGTACACTTCATTCTCTCCAAAGG; designated herein as SEQ ID NO: 8; probe sequence CTGACCTGGTTCCC, designated herein as SEQ ID NO: 9) was used to measure mRNA levels. DGAT2 mRNA levels were adjusted according to total RNA content, as measured by RIBOGREEN®. Results are presented as percent inhibition of DGAT2, relative to untreated control cells. ‘0’ indicates that the mRNA levels were not inhibited.

[0476] The half maximal inhibitory concentration (IC₅₀) of each oligonucleotide is also presented. DGAT2 mRNA levels were significantly reduced in a dose-dependent manner in antisense oligonucleotide treated cells.

TABLE 79

| | | 12.5 | 25 | 50 | 100 | 200 | IC₅₀ |
|---|---|---|---|---|---|---|---|
| ISIS No | Motif | μM | μM | μM | μM | μM | (μM) |
| 217316 | 5-10-5 | 0 | 0 | 17 | 43 | 76 | 10.9 |
| 217318 | 5-10-5 | 0 | 0 | 10 | 48 | 45 | 18.4 |
| 217328 | 5-10-5 | 12 | 22 | 40 | 69 | 82 | 6.0 |
| 217376 | 5-10-5 | 0 | 0 | 51 | 50 | 70 | 9.8 |
| 381728 | 5-10-5 | 0 | 3 | 17 | 37 | 58 | 15.8 |
| 411896 | 5-10-5 | 5 | 16 | 52 | 73 | 87 | 5.5 |
| 411899 | 5-10-5 | 0 | 0 | 15 | 42 | 54 | 15.7 |
| 411900 | 5-10-5 | 0 | 0 | 18 | 38 | 76 | 11.5 |
| 411950 | 5-10-5 | 5 | 13 | 21 | 49 | 70 | 10.7 |
| 411951 | 5-10-5 | 0 | 10 | 31 | 52 | 76 | 8.9 |
| 413433 | 5-10-5 | 0 | 37 | 58 | 75 | 82 | 5.6 |
| 423453 | 5-10-5 | 16 | 21 | 41 | 73 | 86 | 5.5 |
| 423463 | 5-10-5 | 26 | 33 | 62 | 81 | 85 | 3.5 |
| 423464 | 5-10-5 | 21 | 43 | 58 | 82 | 84 | 3.4 |
| 423606 | 2-13-5 | 30 | 43 | 53 | 76 | 80 | 3.6 |

### Study 6

[0477] Cells were plated at a density of 20,000 cells per well and transfected using electroporation with 0.625 μM, 1.25 μM, 2.5 μM, 5.0 μM, 10 μM, or 20 μM, concentrations of antisense oligonucleotide, as specified in the Tables below. After a treatment period of approximately 16 hours, RNA was isolated from the cells and DGAT2 mRNA levels were measured by quantitative real-time PCR. Human primer probe set RTS2988_MGB was used to measure mRNA levels. DGAT2 mRNA levels were adjusted according to total RNA content, as measured by RIBOGREEN®. Results are presented as percent inhibition of DGAT2, relative to untreated control cells. ‘0’ indicates that the mRNA levels were not inhibited.

[0478] The half maximal inhibitory concentration (IC₅₀) of each oligonucleotide is also presented. DGAT2 mRNA levels were significantly reduced in a dose-dependent manner in antisense oligonucleotide treated cells.

TABLE 80

| | | 0.625 | 1.25 | 2.5 | 5.0 | 10.0 | 20.0 | IC₅₀ |
|---|---|---|---|---|---|---|---|---|
| ISIS No | Motif | μM | μM | μM | μM | μM | μM | (μM) |
| 217317 | 5-10-5 | 11 | 18 | 39 | 59 | 79 | 94 | 3.5 |
| 217328 | 5-10-5 | 13 | 45 | 58 | 87 | 84 | 95 | 1.9 |
| 217376 | 5-10-5 | 10 | 9 | 4 | 28 | 12 | 11 | >20 |
| 217376 | 5-10-5 | 18 | 15 | 12 | 23 | 9 | 0 | >20 |
| 366730 | 5-10-5 | 14 | 23 | 55 | 74 | 86 | 97 | 2.6 |
| 411897 | 5-10-5 | 30 | 28 | 28 | 57 | 73 | 94 | 3.3 |
| 411901 | 5-10-5 | 19 | 22 | 30 | 58 | 76 | 93 | 4.0 |
| 411902 | 5-10-5 | 11 | 6 | 19 | 42 | 72 | 83 | 5.6 |
| 411947 | 5-10-5 | 14 | 14 | 10 | 35 | 66 | 87 | 7.1 |
| 411948 | 5-10-5 | 25 | 21 | 34 | 50 | 57 | 80 | 5.4 |
| 411950 | 5-10-5 | 7 | 24 | 41 | 56 | 74 | 83 | 3.9 |
| 411950 | 5-10-5 | 13 | 14 | 34 | 46 | 79 | 88 | 4.6 |
| 411951 | 5-10-5 | 28 | 18 | 22 | 43 | 83 | 92 | 5.4 |
| 411955 | 5-10-5 | 11 | 26 | 52 | 71 | 96 | 97 | 2.5 |
| 411958 | 5-10-5 | 19 | 17 | 21 | 60 | 81 | 92 | 4.7 |
| 413433 | 5-10-5 | 39 | 62 | 82 | 87 | 88 | 89 | 0.9 |
| 423463 | 5-10-5 | 15 | 36 | 76 | 87 | 92 | 90 | 1.7 |
| 423463 | 5-10-5 | 31 | 64 | 85 | 90 | 91 | 89 | 1.0 |
| 423489 | 3-14-3 | 21 | 17 | 39 | 73 | 89 | 98 | 3.2 |
| 423606 | 2-13-5 | 18 | 36 | 50 | 85 | 87 | 92 | 2.2 |

### Example 8: Dose-Dependent Antisense Inhibition of Human DGAT2 in HepG2 Cells by MOE Gapmers

[0479] Gapmers from the studies described in the Examples above exhibiting significant in vitro inhibition of DGAT2 mRNA were selected and tested at various doses in HepG2 cells. The antisense oligonucleotides were tested in a series of experiments that had similar culture conditions. The results for each experiment are presented in separate tables shown below. Cells were plated at a density of 20,000 cells per well and transfected using electroporation with 0.625 μM, 1.25 μM, 2.50 μM, 5.00 μM, or 10.00 μM concentrations of antisense oligonucleotide, as specified in the Tables below. After a treatment period of approximately 16 hours, RNA was isolated from the cells and DGAT2 mRNA levels were measured by quantitative real-time PCR. Human primer probe set RTS2988_MGB was used to measure mRNA levels. DGAT2 mRNA levels were adjusted according to total RNA content, as measured by RIBOGREEN®. Results are presented as percent inhibition of DGAT2, relative to untreated control cells. ‘0’ indicates that the mRNA levels were not inhibited.

[0480] The half maximal inhibitory concentration (IC₅₀) of each oligonucleotide is also presented. DGAT2 mRNA levels were significantly reduced in a dose-dependent manner in antisense oligonucleotide treated cells.

TABLE 81

| | 0.625 | 1.25 | 2.50 | 5.00 | 10.00 | IC₅₀ |
|---|---|---|---|---|---|---|
| ISIS No | μM | μM | μM | μM | μM | (μM) |
| 483817 | 47 | 71 | 82 | 89 | 90 | <0.6 |
| 483825 | 40 | 56 | 78 | 85 | 85 | 0.8 |
| 483828 | 45 | 69 | 75 | 70 | 76 | <0.6 |
| 483832 | 42 | 59 | 67 | 78 | 72 | 0.8 |
| 483834 | 26 | 38 | 64 | 86 | 90 | 1.6 |
| 483852 | 47 | 60 | 69 | 81 | 85 | 0.7 |
| 483866 | 76 | 77 | 82 | 86 | 86 | <0.6 |
| 483869 | 39 | 69 | 74 | 72 | 80 | 0.6 |
| 483873 | 46 | 71 | 78 | 82 | 87 | <0.6 |

TABLE 82

| | 0.625 | 1.25 | 2.50 | 5.00 | 10.00 | IC₅₀ |
|---|---|---|---|---|---|---|
| ISIS No | μM | μM | μM | μM | μM | (μM) |
| 483811 | 29 | 34 | 58 | 87 | 87 | 1.7 |
| 483816 | 21 | 14 | 34 | 71 | 87 | 3.0 |
| 483831 | 34 | 37 | 55 | 81 | 83 | 1.7 |
| 483835 | 28 | 47 | 56 | 82 | 89 | 1.6 |
| 483840 | 4 | 17 | 49 | 75 | 81 | 2.9 |
| 483870 | 13 | 31 | 52 | 84 | 88 | 2.2 |
| 483889 | 21 | 0 | 56 | 81 | 85 | 2.7 |
| 483895 | 43 | 21 | 74 | 88 | 92 | 2.0 |
| 483898 | 46 | 47 | 81 | 89 | 86 | 0.8 |
| 483908 | 29 | 16 | 73 | 84 | 88 | 1.9 |
| 483910 | 31 | 39 | 73 | 79 | 76 | 1.5 |
| 483923 | 24 | 0 | 62 | 81 | 89 | 3.4 |
| 483952 | 63 | 67 | 86 | 91 | 89 | <0.6 |

TABLE 83

| | 0.625 | 1.25 | 2.50 | 5.00 | 10.00 | IC₅₀ |
|---|---|---|---|---|---|---|
| ISIS No | μM | μM | μM | μM | μM | (μM) |
| 483968 | 39 | 55 | 76 | 89 | 88 | 0.9 |
| 483969 | 29 | 57 | 70 | 82 | 89 | 1.2 |
| 483970 | 16 | 48 | 62 | 71 | 85 | 1.9 |
| 483972 | 17 | 52 | 69 | 78 | 78 | 1.7 |
| 483984 | 53 | 74 | 85 | 83 | 78 | <0.6 |
| 483986 | 15 | 37 | 59 | 71 | 83 | 2.2 |
| 483987 | 9 | 0 | 76 | 78 | 91 | 1.5 |
| 483993 | 42 | 58 | 69 | 69 | 78 | 0.8 |
| 483996 | 20 | 46 | 53 | 63 | 74 | 2.3 |
| 483997 | 20 | 61 | 72 | 82 | 82 | 1.3 |
| 484004 | 27 | 57 | 65 | 74 | 83 | 1.4 |
| 484006 | 22 | 47 | 65 | 72 | 86 | 1.7 |
| 484010 | 27 | 0 | 51 | 78 | 86 | 2.0 |
| 484017 | 28 | 51 | 66 | 79 | 88 | 1.4 |

TABLE 84

| | 0.625 | 1.25 | 2.50 | 5.00 | 10.00 | IC₅₀ |
|---|---|---|---|---|---|---|
| ISIS No | UM | UM | μM | μM | μM | (μM) |
| 413433 | 11 | 53 | 74 | 85 | 83 | 1.6 |
| 484012 | 19 | 36 | 49 | 76 | 88 | 2.2 |
| 484020 | 26 | 49 | 66 | 70 | 78 | 1.6 |
| 484041 | 12 | 45 | 51 | 68 | 80 | 2.4 |
| 484049 | 35 | 62 | 68 | 82 | 81 | 0.9 |
| 484094 | 20 | 37 | 52 | 62 | 74 | 2.7 |
| 484099 | 32 | 44 | 77 | 84 | 89 | 1.3 |
| 484111 | 22 | 50 | 65 | 54 | 80 | 2.0 |
| 484114 | 29 | 47 | 69 | 68 | 72 | 1.6 |
| 484118 | 10 | 42 | 60 | 74 | 84 | 2.1 |
| 484182 | 0 | 57 | 59 | 79 | 74 | 2.3 |

TABLE 85

| | 0.625 | 1.25 | 2.50 | 5.00 | 10.00 | IC₅₀ |
|---|---|---|---|---|---|---|
| ISIS No | μM | μM | μM | μM | μM | (μM) |
| 413433 | 33 | 46 | 65 | 81 | 87 | 1.4 |
| 484109 | 17 | 1 | 46 | 65 | 83 | 3.3 |
| 484138 | 9 | 15 | 17 | 28 | 53 | >10 |
| 484139 | 14 | 21 | 60 | 75 | 90 | 2.3 |
| 484152 | 25 | 46 | 75 | 89 | 91 | 1.4 |
| 484175 | 10 | 15 | 21 | 35 | 43 | >10 |
| 484183 | 3 | 15 | 20 | 34 | 55 | >10 |
| 484203 | 23 | 35 | 54 | 70 | 75 | 2.3 |
| 484209 | 21 | 36 | 50 | 74 | 88 | 2.2 |
| 484215 | 42 | 45 | 59 | 84 | 91 | 1.2 |
| 484217 | 23 | 36 | 56 | 82 | 93 | 1.9 |
| 484231 | 34 | 0 | 72 | 79 | 82 | 1 |
| 423463 | 35 | 53 | 73 | 86 | 87 | 1.1 |

TABLE 86

| | 0.625 | 1.25 | 2.50 | 5.00 | 10.00 | IC₅₀ |
|---|---|---|---|---|---|---|
| ISIS No | μM | μM | μM | μM | μM | (μM) |
| 413433 | 37 | 55 | 72 | 84 | 88 | 1 |
| 423464 | 41 | 62 | 79 | 92 | 90 | 0.7 |
| 484268 | 34 | 57 | 73 | 81 | 84 | 1 |
| 484269 | 24 | 47 | 64 | 67 | 75 | 1.8 |
| 484270 | 29 | 50 | 65 | 88 | 91 | 1.3 |
| 484271 | 43 | 66 | 81 | 88 | 84 | 0.6 |
| 484273 | 42 | 62 | 73 | 79 | 78 | 0.7 |
| 484283 | 26 | 0 | 61 | 85 | 93 | 1.6 |
| 484284 | 27 | 38 | 54 | 76 | 81 | 1.9 |
| 484292 | 31 | 31 | 53 | 81 | 91 | 1.8 |
| 484293 | 26 | 36 | 61 | 78 | 87 | 1.8 |
| 484327 | 24 | 48 | 48 | 67 | 79 | 2.1 |
| 484342 | 21 | 34 | 48 | 67 | 88 | 2.4 |
| 484387 | 21 | 0 | 21 | 40 | 58 | 9.6 |
| 484396 | 15 | 13 | 18 | 24 | 44 | >10 |

TABLE 87

| | 0.625 | 1.25 | 2.50 | 5.00 | 10.00 | IC₅₀ |
|---|---|---|---|---|---|---|
| ISIS No | μM | μM | μM | μM | μM | (μM) |
| 413433 | 30 | 57 | 80 | 81 | 86 | 1.1 |
| 484345 | 17 | 28 | 68 | 60 | 79 | 2.4 |
| 484354 | 20 | 28 | 75 | 60 | 79 | 2.2 |
| 484366 | 25 | 33 | 37 | 62 | 82 | 2.8 |
| 484368 | 16 | 39 | 57 | 73 | 89 | 2.1 |
| 484369 | 22 | 18 | 57 | 27 | 35 | >10 |
| 484372 | 3 | 28 | 37 | 69 | 76 | 3.3 |
| 484376 | 12 | 0 | 52 | 64 | 67 | 3.1 |
| 484379 | 0 | 19 | 21 | 37 | 75 | 5.6 |
| 484380 | 0 | 26 | 34 | 47 | 71 | 4.7 |
| 484395 | 7 | 41 | 61 | 29 | 46 | >10 |
| 484397 | 0 | 7 | 52 | 16 | 34 | >10 |
| 484406 | 17 | 6 | 53 | 39 | 53 | 7.5 |
| 484408 | 4 | 0 | 16 | 24 | 38 | >10 |
| 484409 | 0 | 6 | 0 | 41 | 59 | 9.0 |

TABLE 88

| | 0.625 | 1.25 | 2.50 | 5.00 | 10.00 | IC₅₀ |
|---|---|---|---|---|---|---|
| ISIS No | μM | μM | μM | μM | μM | (μM) |
| 413433 | 22 | 51 | 68 | 72 | 88 | 1.6 |
| 472316 | 15 | 45 | 45 | 82 | 89 | 2.1 |
| 472317 | 34 | 30 | 43 | 77 | 91 | 2.0 |
| 472318 | 22 | 38 | 52 | 68 | 85 | 2.2 |
| 472444 | 22 | 27 | 41 | 39 | 74 | 4.4 |
| 472447 | 0 | 18 | 16 | 18 | 69 | 9.0 |
| 472456 | 10 | 10 | 48 | 51 | 68 | 4.3 |
| 472480 | 7 | 0 | 41 | 59 | 87 | 3.0 |
| 472481 | 29 | 29 | 37 | 62 | 84 | 2.7 |
| 472482 | 16 | 29 | 42 | 67 | 85 | 2.7 |
| 472484 | 23 | 19 | 51 | 72 | 87 | 2.4 |
| 472486 | 28 | 40 | 59 | 83 | 90 | 1.7 |
| 472488 | 27 | 31 | 36 | 53 | 64 | 4.4 |
| 472496 | 0 | 0 | 37 | 51 | 76 | 3.8 |
| 484410 | 0 | 40 | 19 | 24 | 39 | >10 |

TABLE 89

| | 0.625 | 1.25 | 2.50 | 5.00 | 10.00 | IC₅₀ |
|---|---|---|---|---|---|---|
| ISIS No | μM | μM | μM | μM | μM | (μM) |
| 413433 | 37 | 51 | 70 | 84 | 88 | 1.1 |
| 472548 | 15 | 30 | 25 | 54 | 78 | 3.9 |
| 472552 | 15 | 28 | 33 | 51 | 66 | 4.7 |
| 472570 | 29 | 46 | 56 | 83 | 90 | 1.6 |
| 472571 | 29 | 34 | 53 | 70 | 86 | 2 |
| 411955 | 0 | 41 | 46 | 68 | 85 | 2.2 |
| 472608 | 28 | 26 | 56 | 59 | 72 | 2.7 |
| 472610 | 18 | 0 | 51 | 70 | 79 | 2.6 |
| 472637 | 24 | 37 | 39 | 53 | 72 | 3.4 |
| 472652 | 18 | 43 | 55 | 71 | 81 | 2.1 |
| 472725 | 35 | 46 | 61 | 77 | 86 | 1.4 |
| 472733 | 39 | 34 | 41 | 63 | 74 | 2.5 |
| 472738 | 38 | 53 | 65 | 81 | 85 | 1.1 |
| 472793 | 0 | 0 | 51 | 67 | 75 | 2 |
| 472811 | 0 | 44 | 65 | 78 | 77 | 1.4 |

TABLE 90

| | 0.625 | 1.25 | 2.50 | 5.00 | 10.00 | IC₅₀ |
|---|---|---|---|---|---|---|
| ISIS No | μM | μM | μM | μM | μM | (μM) |
| 413433 | 0 | 47 | 72 | 84 | 88 | 2 |
| 472316 | 21 | 42 | 69 | 86 | 94 | 2 |
| 484152 | 20 | 57 | 79 | 90 | 93 | 1 |
| 484215 | 33 | 39 | 70 | 91 | 95 | 1 |
| 484217 | 19 | 18 | 49 | 89 | 94 | 2 |
| 484231 | 4 | 52 | 76 | 83 | 91 | 2 |
| 423463 | 33 | 54 | 79 | 91 | 91 | 1 |
| 423464 | 0 | 48 | 78 | 83 | 88 | 3 |
| 484268 | 0 | 3 | 0 | 13 | 50 | >10 |
| 484270 | 7 | 36 | 49 | 80 | 83 | 2 |
| 484271 | 16 | 59 | 76 | 86 | 91 | 1 |
| 484283 | 10 | 35 | 56 | 87 | 92 | 2 |
| 484369 | 25 | 1 | 0 | 5 | 33 | >10 |

TABLE 91

| | 0.625 | 1.25 | 2.50 | 5.00 | 10.00 | IC₅₀ |
|---|---|---|---|---|---|---|
| ISIS No | μM | μM | μM | μM | μM | (μM) |
| 413433 | 28 | 60 | 69 | 84 | 92 | 1 |
| 483811 | 0 | 19 | 53 | 77 | 85 | 3 |
| 483817 | 47 | 69 | 85 | 88 | 94 | <0.6 |
| 483825 | 18 | 50 | 80 | 82 | 87 | 1 |
| 483834 | 16 | 37 | 72 | 89 | 87 | 2 |
| 483835 | 1 | 29 | 56 | 80 | 85 | 2 |
| 483866 | 55 | 79 | 88 | 83 | 90 | <0.6 |
| 483873 | 27 | 75 | 87 | 86 | 91 | 1 |
| 483898 | 49 | 72 | 82 | 89 | 89 | <0.6 |
| 483908 | 35 | 45 | 76 | 89 | 88 | 1 |
| 483913 | 0 | 42 | 76 | 86 | 89 | 2 |

TABLE 92

| | 0.625 | 1.25 | 2.50 | 5.00 | 10.00 | IC₅₀ |
|---|---|---|---|---|---|---|
| ISIS No | μM | μM | μM | μM | μM | (μM) |
| 413433 | 47 | 68 | 84 | 90 | 88 | <0.6 |
| 423453 | 36 | 66 | 81 | 95 | 96 | 0.8 |
| 472158 | 56 | 51 | 75 | 91 | 96 | 0.6 |
| 472725 | 43 | 59 | 63 | 78 | 80 | 0.8 |
| 472738 | 38 | 58 | 65 | 77 | 81 | 1 |
| 483895 | 35 | 53 | 76 | 92 | 93 | 1.0 |
| 483923 | 26 | 46 | 76 | 88 | 92 | 1.3 |
| 483952 | 60 | 82 | 88 | 93 | 92 | <0.6 |
| 483968 | 46 | 70 | 82 | 91 | 93 | <0.6 |
| 483984 | 39 | 67 | 87 | 88 | 88 | 0.6 |
| 483987 | 40 | 60 | 75 | 90 | 95 | 0.9 |
| 483997 | 50 | 63 | 73 | 90 | 92 | 0.6 |
| 484099 | 56 | 75 | 88 | 93 | 95 | <0.6 |

TABLE 93

| | 0.625 | 1.25 | 2.50 | 5.00 | 10.00 | IC₅₀ |
|---|---|---|---|---|---|---|
| ISIS No | μM | μM | μM | μM | μM | (μM) |
| 413433 | 26 | 53 | 75 | 86 | 91 | 1.3 |
| 495429 | 8 | 42 | 68 | 86 | 92 | 1.9 |
| 495449 | 19 | 53 | 74 | 87 | 86 | 1.4 |
| 495450 | 30 | 58 | 74 | 87 | 93 | 1.1 |
| 495470 | 0 | 36 | 59 | 82 | 92 | 2.2 |
| 495481 | 15 | 39 | 75 | 84 | 86 | 1.7 |
| 495484 | 19 | 50 | 73 | 87 | 87 | 1.5 |
| 495488 | 5 | 32 | 45 | 67 | 86 | 2.8 |
| 495489 | 13 | 36 | 54 | 81 | 91 | 2.1 |
| 495490 | 20 | 42 | 66 | 83 | 88 | 1.7 |
| 495492 | 5 | 38 | 64 | 81 | 90 | 2.1 |
| 495495 | 29 | 32 | 62 | 78 | 90 | 1.8 |
| 495496 | 21 | 44 | 62 | 79 | 92 | 1.7 |
| 495497 | 20 | 42 | 59 | 69 | 88 | 2.0 |
| 495498 | 21 | 54 | 68 | 81 | 90 | 1.5 |

TABLE 94

| | 0.625 | 1.25 | 2.50 | 5.00 | 10.00 | IC₅₀ |
|---|---|---|---|---|---|---|
| ISIS No | μM | μM | μM | μM | μM | (μM) |
| 413433 | 35 | 42 | 73 | 86 | 90 | 1.3 |
| 495442 | 6 | 29 | 43 | 68 | 80 | 3.0 |
| 495451 | 21 | 31 | 51 | 76 | 87 | 2.2 |
| 495453 | 21 | 34 | 64 | 80 | 84 | 1.9 |
| 495454 | 23 | 33 | 53 | 80 | 86 | 2.1 |
| 495463 | 4 | 28 | 53 | 74 | 85 | 2.6 |
| 495464 | 21 | 41 | 65 | 84 | 84 | 1.7 |
| 495466 | 12 | 35 | 57 | 76 | 84 | 2.2 |
| 495467 | 17 | 28 | 44 | 69 | 89 | 2.6 |
| 495469 | 17 | 24 | 53 | 81 | 83 | 2.4 |
| 495471 | 29 | 43 | 58 | 83 | 84 | 1.6 |
| 495472 | 4 | 38 | 63 | 78 | 80 | 2.3 |
| 495482 | 7 | 32 | 52 | 76 | 91 | 2.4 |
| 495485 | 8 | 29 | 55 | 76 | 76 | 2.6 |
| 495491 | 25 | 42 | 64 | 85 | 92 | 1.6 |

TABLE 95

| | 0.625 | 1.25 | 2.50 | 5.00 | 10.00 | IC₅₀ |
|---|---|---|---|---|---|---|
| ISIS No | μM | μM | μM | μM | μM | (μM) |
| 413433 | 40 | 48 | 75 | 86 | 86 | 1 |
| 495430 | 0 | 5 | 11 | 47 | 67 | 6.2 |
| 495441 | 17 | 17 | 55 | 77 | 87 | 2.5 |
| 495443 | 28 | 51 | 59 | 74 | 84 | 1.6 |
| 495448 | 13 | 28 | 32 | 61 | 79 | 3.4 |
| 495452 | 13 | 51 | 47 | 71 | 78 | 2.3 |
| 495462 | 46 | 47 | 51 | 76 | 84 | 1.2 |
| 495465 | 2 | 20 | 35 | 68 | 78 | 3.5 |
| 495468 | 22 | 20 | 46 | 56 | 84 | 3 |
| 495473 | 11 | 24 | 48 | 69 | 75 | 3 |
| 495479 | 19 | 29 | 54 | 76 | 85 | 2.2 |
| 495483 | 15 | 9 | 47 | 77 | 88 | 2.7 |
| 495516 | 49 | 76 | 89 | 90 | 93 | <0.6 |
| 495562 | 20 | 55 | 70 | 88 | 92 | 1.4 |
| 495576 | 51 | 69 | 88 | 93 | 94 | <0.6 |

TABLE 96

| | 0.625 | 1.25 | 2.50 | 5.00 | 10.00 | IC₅₀ |
|---|---|---|---|---|---|---|
| ISIS No | μM | μM | μM | μM | μM | (μM) |
| 413433 | 34 | 51 | 71 | 86 | 89 | 1.1 |
| 495505 | 34 | 58 | 80 | 87 | 91 | 1.0 |
| 495517 | 19 | 55 | 78 | 85 | 91 | 1.3 |
| 495518 | 24 | 51 | 72 | 87 | 90 | 1.4 |
| 495519 | 33 | 46 | 70 | 86 | 90 | 1.3 |
| 495520 | 63 | 84 | 89 | 90 | 91 | <0.6 |
| 495522 | 45 | 32 | 54 | 82 | 89 | 1.5 |
| 495523 | 14 | 46 | 66 | 86 | 91 | 1.7 |
| 495524 | 12 | 39 | 60 | 84 | 93 | 1.9 |
| 495554 | 35 | 64 | 75 | 89 | 90 | 0.9 |
| 495555 | 42 | 49 | 72 | 87 | 91 | 1 |
| 495563 | 35 | 41 | 66 | 84 | 91 | 1.4 |
| 495571 | 21 | 41 | 67 | 87 | 93 | 1.6 |
| 495575 | 33 | 43 | 62 | 82 | 84 | 1.5 |
| 495577 | 33 | 56 | 71 | 85 | 91 | 1.1 |

TABLE 97

| | 0.625 | 1.25 | 2.50 | 5.00 | 10.00 | IC₅₀ |
|---|---|---|---|---|---|---|
| ISIS No | μM | μM | μM | μM | μM | (μM) |
| 413433 | 39 | 52 | 66 | 81 | 87 | 1.1 |
| 495570 | 27 | 50 | 55 | 78 | 89 | 1.6 |
| 495650 | 0 | 38 | 58 | 65 | 85 | 2.7 |
| 495561 | 24 | 54 | 71 | 87 | 92 | 1.3 |
| 495618 | 0 | 35 | 50 | 79 | 87 | 2.5 |
| 495540 | 11 | 35 | 48 | 74 | 88 | 2.4 |
| 495649 | 0 | 24 | 43 | 76 | 82 | 3.1 |
| 495515 | 22 | 45 | 69 | 83 | 91 | 1.6 |
| 495599 | 25 | 23 | 42 | 73 | 86 | 2.5 |
| 495620 | 27 | 54 | 63 | 85 | 91 | 1.4 |
| 495606 | 16 | 27 | 56 | 80 | 90 | 2.2 |
| 495604 | 31 | 48 | 77 | 83 | 90 | 1.2 |
| 495609 | 52 | 66 | 80 | 84 | 90 | <0.6 |
| 495619 | 29 | 42 | 63 | 73 | 90 | 1.6 |
| 495621 | 0 | 28 | 31 | 69 | 84 | 3.3 |

TABLE 98

| | 0.625 | 1.25 | 2.50 | 5.00 | 10.00 | IC₅₀ |
|---|---|---|---|---|---|---|
| ISIS No | μM | μM | μM | μM | μM | (μM) |
| 413433 | 19 | 24 | 66 | 81 | 88 | 2.1 |
| 495591 | 7 | 24 | 43 | 66 | 82 | 3.0 |
| 495744 | 25 | 41 | 51 | 73 | 84 | 2.0 |
| 495685 | 34 | 58 | 73 | 84 | 83 | 1.0 |
| 495738 | 26 | 41 | 61 | 81 | 83 | 1.7 |
| 495707 | 33 | 46 | 61 | 76 | 72 | 1.5 |
| 495837 | 30 | 33 | 67 | 90 | 94 | 1.6 |
| 495752 | 14 | 30 | 68 | 86 | 91 | 1.9 |
| 495839 | 15 | 67 | 83 | 90 | 91 | 1.2 |
| 495736 | 28 | 41 | 65 | 83 | 85 | 1.6 |
| 495840 | 39 | 59 | 78 | 92 | 93 | 0.8 |
| 495753 | 43 | 48 | 69 | 87 | 97 | 1.0 |
| 495878 | 34 | 62 | 78 | 92 | 96 | 0.9 |
| 495749 | 21 | 23 | 52 | 84 | 89 | 2.2 |
| 495756 | 24 | 29 | 58 | 80 | 89 | 2.0 |

TABLE 99

| | 0.625 | 1.25 | 2.50 | 5.00 | 10.00 | IC₅₀ |
|---|---|---|---|---|---|---|
| ISIS No | μM | μM | μM | μM | μM | (μM) |
| 413433 | 28 | 60 | 70 | 83 | 84 | 1.1 |
| 495853 | 39 | 51 | 78 | 92 | 96 | 1 |
| 495857 | 41 | 49 | 67 | 87 | 91 | 1.1 |
| 495829 | 41 | 68 | 81 | 90 | 90 | 0.6 |
| 495818 | 12 | 38 | 57 | 77 | 93 | 2.1 |
| 495842 | 40 | 67 | 80 | 88 | 91 | 0.7 |
| 495849 | 37 | 53 | 66 | 79 | 82 | 1.1 |
| 495836 | 16 | 54 | 63 | 80 | 88 | 1.6 |
| 495875 | 22 | 58 | 63 | 80 | 93 | 1.4 |
| 495841 | 43 | 66 | 76 | 87 | 90 | 0.6 |
| 495819 | 13 | 38 | 54 | 74 | 90 | 2.2 |
| 495825 | 36 | 52 | 69 | 88 | 93 | 1.1 |
| 495832 | 20 | 50 | 65 | 78 | 85 | 1.6 |
| 495809 | 16 | 37 | 46 | 78 | 85 | 2.3 |
| 495876 | 19 | 39 | 65 | 86 | 95 | 1.7 |

TABLE 100

| | 0.625 | 1.25 | 2.50 | 5.00 | 10.00 | IC₅₀ |
|---|---|---|---|---|---|---|
| ISIS No | μM | μM | μM | μM | μM | (μM) |
| 413433 | 46 | 61 | 82 | 86 | 86 | 0.6 |
| 496037 | 23 | 38 | 57 | 74 | 93 | 1.9 |
| 496038 | 10 | 31 | 42 | 67 | 93 | 2.6 |
| 496039 | 9 | 19 | 35 | 67 | 88 | 3.1 |
| 496040 | 4 | 38 | 45 | 70 | 88 | 2.6 |
| 496041 | 21 | 30 | 50 | 84 | 95 | 2.1 |
| 496043 | 2 | 26 | 58 | 80 | 87 | 2.4 |
| 495826 | 7 | 44 | 72 | 82 | 85 | 1.9 |
| 495868 | 27 | 38 | 75 | 83 | 85 | 1.5 |
| 495901 | 18 | 46 | 69 | 79 | 83 | 1.7 |
| 495902 | 20 | 48 | 66 | 82 | 85 | 1.6 |
| 495955 | 3 | 3 | 54 | 66 | 75 | 3.5 |
| 495992 | 26 | 43 | 74 | 86 | 92 | 1.4 |
| 496100 | 20 | 30 | 56 | 71 | 85 | 2.3 |
| 496104 | 37 | 35 | 48 | 72 | 81 | 1.9 |

TABLE 101

| | 0.625 | 1.25 | 2.50 | 5.00 | 10.00 | IC₅₀ |
|---|---|---|---|---|---|---|
| ISIS No | μM | μM | μM | μM | μM | (μM) |
| 413433 | 33 | 49 | 70 | 75 | 90 | 1.3 |
| 501838 | 32 | 52 | 67 | 73 | 71 | 1.3 |
| 501849 | 39 | 63 | 76 | 85 | 93 | 0.8 |
| 501850 | 29 | 59 | 72 | 88 | 92 | 1.1 |
| 501852 | 43 | 63 | 75 | 80 | 87 | 0.7 |
| 501855 | 57 | 70 | 87 | 90 | 92 | <0.6 |
| 501861 | 39 | 63 | 80 | 90 | 93 | 0.8 |
| 501871 | 28 | 53 | 76 | 84 | 93 | 1.2 |
| 501883 | 33 | 45 | 62 | 73 | 82 | 1.5 |
| 501884 | 41 | 59 | 75 | 86 | 92 | 0.8 |
| 501886 | 42 | 63 | 71 | 78 | 84 | 0.7 |
| 501890 | 32 | 49 | 61 | 72 | 79 | 1.5 |
| 501932 | 38 | 49 | 68 | 80 | 85 | 1.1 |
| 501944 | 30 | 43 | 69 | 80 | 87 | 1.4 |
| 501950 | 32 | 49 | 70 | 72 | 91 | 1.3 |

TABLE 102

| | 0.625 | 1.25 | 2.50 | 5.00 | 10.00 | IC₅₀ |
|---|---|---|---|---|---|---|
| ISIS No | μM | μM | μM | μM | μM | (μM) |
| 413433 | 35 | 53 | 69 | 86 | 91 | 1.1 |
| 501903 | 32 | 39 | 62 | 80 | 90 | 1.6 |
| 501916 | 29 | 42 | 61 | 78 | 88 | 1.6 |
| 501933 | 37 | 51 | 66 | 75 | 77 | 1.2 |
| 501934 | 26 | 41 | 52 | 69 | 82 | 2 |
| 501946 | 15 | 34 | 57 | 76 | 90 | 2.1 |
| 501947 | 35 | 54 | 74 | 87 | 93 | 1.1 |
| 501951 | 36 | 54 | 75 | 85 | 93 | 1 |
| 501957 | 27 | 41 | 67 | 76 | 86 | 1.7 |
| 501959 | 40 | 52 | 72 | 81 | 87 | 1 |
| 501960 | 35 | 52 | 67 | 82 | 90 | 1.2 |
| 501966 | 34 | 42 | 64 | 75 | 84 | 1.5 |
| 501968 | 29 | 49 | 73 | 84 | 91 | 1.3 |
| 501977 | 19 | 28 | 49 | 74 | 88 | 2.3 |
| 502040 | 24 | 38 | 54 | 73 | 88 | 2 |

TABLE 103

| | 0.625 | 1.25 | 2.50 | 5.00 | 10.00 | IC₅₀ |
|---|---|---|---|---|---|---|
| ISIS No | μM | μM | μM | μM | μM | (μM) |
| 413433 | 37 | 53 | 72 | 83 | 39 | 1.1 |
| 501981 | 21 | 43 | 62 | 79 | 90 | 1.7 |
| 501982 | 28 | 53 | 64 | 70 | 82 | 1.5 |
| 501983 | 29 | 41 | 57 | 75 | 84 | 1.8 |
| 502013 | 24 | 42 | 60 | 74 | 80 | 1.9 |
| 502015 | 19 | 39 | 57 | 63 | 71 | 2.5 |
| 502025 | 22 | 48 | 59 | 78 | 89 | 1.7 |
| 502026 | 21 | 39 | 56 | 77 | 86 | 2 |
| 502037 | 15 | 13 | 38 | 56 | 87 | 3.4 |
| 502038 | 3 | 14 | 52 | 55 | 77 | 3.5 |
| 502045 | 45 | 47 | 63 | 75 | 85 | 1.1 |
| 502046 | 21 | 37 | 50 | 71 | 81 | 2.3 |
| 502056 | 44 | 67 | 82 | 86 | 41 | 0.6 |
| 502083 | 37 | 55 | 76 | 89 | 93 | 1 |
| 502119 | 37 | 60 | 77 | 88 | 92 | 0.9 |

TABLE 104

| | 0.625 | 1.25 | 2.50 | 5.00 | 10.00 | IC₅₀ |
|---|---|---|---|---|---|---|
| ISIS No | μM | μM | μM | μM | μM | (μM) |
| 413433 | 40 | 58 | 77 | 88 | 91 | 0.8 |
| 502075 | 30 | 47 | 69 | 82 | 91 | 1.4 |
| 502098 | 37 | 59 | 74 | 88 | 94 | 0.9 |
| 502099 | 43 | 59 | 76 | 88 | 94 | 0.8 |
| 502154 | 64 | 72 | 84 | 88 | 90 | <0.6 |
| 502155 | 34 | 54 | 72 | 82 | 87 | 1.1 |
| 502156 | 17 | 38 | 57 | 83 | 87 | 2 |
| 502163 | 41 | 60 | 82 | 92 | 93 | 0.7 |
| 502164 | 41 | 73 | 78 | 89 | 90 | 0.6 |
| 502175 | 33 | 58 | 74 | 87 | 90 | 1 |
| 502179 | 61 | 74 | 81 | 87 | 87 | <0.6 |
| 502189 | 33 | 52 | 79 | 91 | 94 | 1.1 |
| 502191 | 53 | 67 | 84 | 92 | 92 | <0.6 |
| 502194 | 48 | 64 | 83 | 87 | 92 | <0.6 |
| 502228 | 34 | 47 | 67 | 80 | 89 | 1.3 |

TABLE 105

| | 0.625 | 1.25 | 2.50 | 5.00 | 10.00 | IC₅₀ |
|---|---|---|---|---|---|---|
| ISIS No | μM | μM | μM | μM | μM | (μM) |
| 413433 | 24 | 28 | 51 | 68 | 83 | 2.4 |
| 495756 | 49 | 71 | 87 | 88 | 94 | <0.6 |
| 507692 | 48 | 70 | 83 | 88 | 93 | <0.6 |
| 507693 | 48 | 68 | 86 | 91 | 93 | <0.6 |
| 507694 | 41 | 61 | 81 | 88 | 93 | 0.7 |
| 507695 | 36 | 53 | 72 | 84 | 93 | 1.1 |
| 507696 | 51 | 74 | 83 | 89 | 94 | <0.6 |
| 507710 | 48 | 72 | 71 | 90 | 91 | <0.6 |
| 507716 | 42 | 54 | 83 | 91 | 95 | 0.8 |
| 507717 | 44 | 65 | 79 | 86 | 90 | 0.6 |
| 502314 | 25 | 38 | 61 | 79 | 93 | 1.7 |
| 502319 | 47 | 66 | 80 | 92 | 94 | 0.6 |
| 502322 | 45 | 69 | 81 | 89 | 86 | <0.6 |
| 502331 | 34 | 45 | 53 | 71 | 89 | 1.6 |
| 502334 | 52 | 68 | 77 | 89 | 93 | <0.6 |

TABLE 106

| | 0.625 | 1.25 | 2.50 | 5.00 | 10.00 | IC₅₀ |
|---|---|---|---|---|---|---|
| ISIS No | μM | μM | μM | μM | μM | (μM) |
| 413433 | 30 | 49 | 73 | 87 | 90 | 1.2 |
| 522366 | 32 | 53 | 68 | 80 | 84 | 1.2 |
| 522373 | 39 | 62 | 81 | 87 | 91 | 0.8 |
| 522374 | 39 | 50 | 71 | 85 | 91 | 1.1 |
| 522375 | 23 | 49 | 73 | 87 | 91 | 1.4 |
| 522383 | 46 | 64 | 79 | 83 | 85 | <0.6 |
| 522435 | 39 | 62 | 76 | 86 | 88 | 0.8 |
| 522437 | 33 | 62 | 78 | 87 | 90 | 0.9 |
| 522444 | 37 | 69 | 81 | 88 | 92 | 0.7 |
| 522445 | 62 | 54 | 68 | 85 | 91 | <0.6 |
| 522450 | 29 | 46 | 69 | 86 | 86 | 1.4 |
| 522473 | 19 | 33 | 66 | 78 | 86 | 2 |
| 522484 | 63 | 72 | 81 | 80 | 81 | <0.6 |
| 522485 | 37 | 43 | 70 | 82 | 90 | 1.3 |
| 522501 | 38 | 66 | 79 | 84 | 86 | 0.7 |

TABLE 107

| | 0.625 | 1.25 | 2.50 | 5.00 | 10.00 | IC₅₀ |
|---|---|---|---|---|---|---|
| ISIS No | μM | μM | μM | μM | μM | (μM) |
| 413433 | 20 | 48 | 75 | 84 | 89 | 1.5 |
| 522440 | 31 | 51 | 69 | 79 | 85 | 1.3 |
| 522465 | 26 | 45 | 68 | 81 | 89 | 1.5 |
| 522474 | 17 | 40 | 65 | 78 | 87 | 1.9 |
| 522495 | 15 | 28 | 69 | 82 | 85 | 2 |
| 522509 | 24 | 38 | 61 | 88 | 87 | 1.7 |
| 522529 | 21 | 38 | 68 | 58 | 87 | 2 |
| 522553 | 15 | 29 | 61 | 81 | 90 | 2.1 |
| 522579 | 23 | 43 | 58 | 83 | 89 | 1.7 |
| 522580 | 50 | 36 | 68 | 84 | 93 | 1.1 |
| 522581 | 16 | 21 | 59 | 82 | 92 | 2.2 |
| 522582 | 23 | 48 | 59 | 86 | 91 | 1.6 |
| 522587 | 21 | 52 | 69 | 90 | 95 | 1.4 |
| 522588 | 19 | 41 | 65 | 88 | 94 | 1.7 |
| 522589 | 38 | 57 | 80 | 96 | 92 | 0.9 |

TABLE 108

| | 0.625 | 1.25 | 2.50 | 5.00 | 10.00 | IC₅₀ |
|---|---|---|---|---|---|---|
| ISIS No | μM | μM | μM | μM | μM | (μM) |
| 413433 | 34 | 49 | 77 | 79 | 91 | 1.2 |
| 522550 | 16 | 45 | 58 | 80 | 89 | 1.9 |
| 522554 | 26 | 39 | 60 | 71 | 87 | 1.9 |
| 522555 | 38 | 50 | 66 | 74 | 81 | 1.2 |
| 522556 | 33 | 39 | 59 | 76 | 85 | 1.7 |
| 522609 | 41 | 67 | 87 | 92 | 84 | 0.6 |
| 522610 | 21 | 41 | 65 | 71 | 93 | 1.8 |
| 522621 | 35 | 54 | 71 | 85 | 94 | 1.1 |
| 522627 | 18 | 9 | 57 | 81 | 95 | 2.3 |
| 522631 | 26 | 34 | 70 | 81 | 93 | 1.7 |
| 522632 | 40 | 55 | 82 | 91 | 95 | 0.8 |
| 522638 | 8 | 33 | 63 | 74 | 91 | 2.2 |
| 522643 | 64 | 53 | 69 | 82 | 93 | <0.6 |
| 522667 | 23 | 55 | 75 | 86 | 91 | 1.3 |
| 522688 | 45 | 57 | 80 | 88 | 94 | 0.7 |

TABLE 109

| | 0.625 | 1.25 | 2.50 | 5.00 | 10.00 | IC₅₀ |
|---|---|---|---|---|---|---|
| ISIS No | μM | μM | μM | μM | μM | (μM) |
| 413433 | 33 | 51 | 73 | 80 | 86 | 1.2 |
| 522672 | 20 | 20 | 57 | 89 | 93 | 2.1 |
| 522675 | 20 | 29 | 63 | 78 | 94 | 2 |
| 522676 | 6 | 43 | 62 | 88 | 93 | 1.9 |
| 522677 | 6 | 39 | 63 | 83 | 96 | 2 |
| 522679 | 17 | 35 | 62 | 82 | 92 | 1.9 |
| 522682 | 61 | 57 | 69 | 86 | 90 | <0.6 |
| 522689 | 29 | 57 | 78 | 87 | 93 | 1.1 |
| 522694 | 28 | 33 | 57 | 76 | 92 | 1.8 |
| 522697 | 19 | 31 | 68 | 86 | 95 | 1.8 |
| 522698 | 20 | 54 | 72 | 85 | 93 | 1.4 |
| 522715 | 12 | 48 | 68 | 80 | 88 | 1.8 |
| 522716 | 25 | 35 | 67 | 84 | 90 | 1.7 |
| 522717 | 27 | 56 | 74 | 90 | 88 | 1.2 |
| 522745 | 42 | 62 | 85 | 90 | 92 | 0.7 |

TABLE 110

| | 0.625 | 1.25 | 2.50 | 5.00 | 10.00 | IC₅₀ |
|---|---|---|---|---|---|---|
| ISIS No | μM | μM | μM | μM | μM | (μM) |
| 413433 | 34 | 52 | 78 | 84 | 91 | 1.1 |
| 522671 | 36 | 43 | 72 | 85 | 92 | 1.2 |
| 522678 | 35 | 43 | 65 | 83 | 92 | 1.3 |
| 522680 | 25 | 50 | 63 | 82 | 86 | 1.5 |
| 522681 | 26 | 57 | 69 | 86 | 90 | 1.3 |
| 522683 | 24 | 33 | 65 | 77 | 88 | 1.8 |
| 522687 | 36 | 41 | 68 | 82 | 93 | 1.3 |
| 522690 | 23 | 51 | 67 | 84 | 93 | 1.5 |
| 522692 | 33 | 38 | 59 | 77 | 92 | 1.6 |
| 522705 | 35 | 48 | 66 | 73 | 86 | 1.3 |
| 522719 | 29 | 38 | 62 | 80 | 92 | 1.7 |
| 522757 | 29 | 41 | 60 | 79 | 93 | 1.6 |
| 522770 | 33 | 47 | 78 | 91 | 94 | 1.1 |
| 522784 | 20 | 33 | 54 | 71 | 90 | 2.2 |
| 522807 | 20 | 35 | 61 | 78 | 92 | 1.9 |

TABLE 111

| | 0.625 | 1.25 | 2.50 | 5.00 | 10.00 | IC₅₀ |
|---|---|---|---|---|---|---|
| ISIS No | μM | μM | μM | μM | μM | (μM) |
| 413433 | 32 | 54 | 75 | 84 | 89 | 1.1 |
| 522758 | 26 | 49 | 66 | 87 | 94 | 1.4 |
| 522783 | 32 | 33 | 59 | 77 | 89 | 1.8 |
| 522838 | 16 | 39 | 64 | 75 | 82 | 2.0 |
| 522865 | 16 | 34 | 58 | 80 | 92 | 2.0 |
| 522866 | 16 | 25 | 45 | 66 | 83 | 2.8 |
| 522870 | 18 | 38 | 46 | 79 | 95 | 2.1 |
| 522871 | 13 | 35 | 57 | 80 | 91 | 2.1 |
| 522888 | 27 | 52 | 71 | 85 | 89 | 1.3 |
| 522889 | 36 | 59 | 75 | 81 | 80 | 0.9 |
| 522894 | 31 | 42 | 54 | 80 | 92 | 1.6 |
| 522897 | 29 | 53 | 76 | 88 | 92 | 1.2 |
| 522898 | 18 | 34 | 63 | 77 | 87 | 2.0 |
| 522913 | 40 | 54 | 79 | 90 | 90 | 0.9 |
| 522942 | 27 | 57 | 77 | 85 | 88 | 1.1 |

TABLE 112

| ISIS | 0.625 | 1.25 | 2.50 | 5.00 | 10.00 | IC₅₀ |
|---|---|---|---|---|---|---|
| No | μM | μM | μM | μM | μM | (μM) |
| 413433 | 20 | 46 | 71 | 82 | 89 | 1.6 |
| 334177 | 9 | 30 | 60 | 74 | 92 | 2.3 |
| 522905 | 9 | 24 | 50 | 76 | 94 | 2.5 |
| 522917 | 17 | 35 | 58 | 82 | 93 | 2.0 |
| 522924 | 7 | 36 | 59 | 79 | 95 | 2.1 |
| 522925 | 15 | 36 | 64 | 85 | 95 | 1.8 |
| 522932 | 9 | 29 | 53 | 80 | 92 | 2.3 |
| 522941 | 23 | 44 | 65 | 85 | 91 | 1.6 |
| 522943 | 13 | 44 | 75 | 81 | 88 | 1.7 |
| 522947 | 45 | 30 | 62 | 78 | 94 | 1.4 |
| 522964 | 27 | 48 | 71 | 85 | 95 | 1.4 |
| 495876 | 24 | 33 | 58 | 86 | 94 | 1.8 |
| 495877 | 16 | 25 | 52 | 77 | 87 | 2.4 |
| 495878 | 37 | 69 | 86 | 91 | 96 | 0.7 |
| 523002 | 34 | 54 | 80 | 89 | 93 | 1.0 |

### Example 9: Dose-Dependent Antisense Inhibition of Human DGAT2 in HepG2 Cells by MOE Gapmers

[0481] Gapmers from the studies described in the Examples above exhibiting significant in vitro inhibition of DGAT2 mRNA were selected and tested at various doses in HepG2 cells. The antisense oligonucleotides were tested in a series of experiments that had similar culture conditions. The results for each experiment are presented in separate tables shown below. Cells were plated at a density of 20,000 cells per well and transfected using electroporation with 0.3125 μM, 0.625 μM, 1.25 μM, 2.50 μM, 5.00 μM, or 10.00 μM concentrations of antisense oligonucleotide, as specified in the Tables below. After a treatment period of approximately 16 hours, RNA was isolated from the cells and DGAT2 mRNA levels were measured by quantitative real-time PCR. Human primer probe set RTS2988_MGB was used to measure mRNA levels. DGAT2 mRNA levels were adjusted according to total RNA content, as measured by RIBOGREEN®. Results are presented as percent inhibition of DGAT2, relative to untreated control cells. ‘0’ indicates that the mRNA levels were not inhibited.

[0482] The half maximal inhibitory concentration (IC₅₀) of each oligonucleotide is also presented. DGAT2 mRNA levels were significantly reduced in a dose-dependent manner in antisense oligonucleotide treated cells.

TABLE 113

| | 0.3125 | 0.625 | 1.25 | 2.50 | 5.00 | 10.00 | IC₅₀ |
|---|---|---|---|---|---|---|---|
| ISIS No | μM | μM | μM | μM | μM | μM | (μM) |
| 413433 | 0 | 41 | 65 | 75 | 81 | 87 | 1.3 |
| 484157 | 24 | 52 | 78 | 87 | 95 | 94 | 0.6 |
| 484127 | 10 | 39 | 71 | 86 | 93 | 94 | 0.9 |
| 484181 | 49 | 57 | 76 | 79 | 89 | 90 | 0.3 |
| 484137 | 29 | 41 | 62 | 79 | 89 | 91 | 0.8 |
| 484148 | 0 | 30 | 72 | 77 | 91 | 93 | 1.2 |
| 484169 | 18 | 31 | 48 | 68 | 87 | 88 | 1.3 |
| 484170 | 0 | 51 | 58 | 75 | 94 | 90 | 1.3 |
| 484133 | 36 | 63 | 50 | 58 | 85 | 91 | 1.0 |
| 484140 | 31 | 60 | 65 | 73 | 87 | 92 | 0.6 |
| 484129 | 48 | 62 | 73 | 87 | 91 | 93 | 0.3 |
| 484141 | 40 | 33 | 55 | 64 | 85 | 96 | 0.9 |

TABLE 114

| | 0.3125 | 0.625 | 1.25 | 2.50 | 5.00 | 10.00 | IC₅₀ |
|---|---|---|---|---|---|---|---|
| ISIS No | μM | μM | μM | μM | μM | μM | (μM) |
| 413433 | 36 | 38 | 57 | 64 | 83 | 87 | 0.9 |
| 484158 | 8 | 6 | 39 | 61 | 86 | 91 | 1.9 |
| 484377 | 0 | 2 | 15 | 33 | 78 | 94 | 2.8 |
| 484130 | 18 | 41 | 51 | 79 | 91 | 96 | 1.0 |
| 484336 | 26 | 24 | 45 | 67 | 90 | 92 | 1.3 |
| 484167 | 0 | 0 | 33 | 72 | 89 | 96 | 2.3 |
| 484344 | 17 | 18 | 29 | 48 | 75 | 83 | 2.2 |
| 484156 | 0 | 5 | 29 | 47 | 76 | 81 | 2.9 |
| 484391 | 0 | 0 | 42 | 66 | 84 | 96 | 2.0 |
| 484353 | 0 | 16 | 48 | 72 | 91 | 99 | 1.6 |
| 484350 | 0 | 37 | 49 | 79 | 89 | 87 | 1.5 |
| 484357 | 15 | 23 | 39 | 69 | 91 | 94 | 1.5 |
| 484343 | 25 | 28 | 58 | 80 | 90 | 93 | 1.0 |

TABLE 115

| | 0.3125 | 0.625 | 1.25 | 2.50 | 5.00 | 10.00 | IC₅₀ |
|---|---|---|---|---|---|---|---|
| ISIS No | μM | μM | μM | μM | μM | μM | (μM) |
| 413433 | 34 | 34 | 65 | 83 | 86 | 85 | 0.8 |
| 472155 | 21 | 14 | 20 | 35 | 54 | 73 | 4.1 |
| 472156 | 11 | 23 | 41 | 42 | 66 | 84 | 2.3 |
| 472158 | 27 | 36 | 62 | 77 | 87 | 95 | 0.9 |
| 472175 | 4 | 25 | 30 | 60 | 69 | 89 | 2.1 |
| 472178 | 0 | 0 | 6 | 30 | 54 | 82 | 4.2 |
| 423453 | 32 | 31 | 57 | 77 | 90 | 94 | 0.9 |
| 380132 | 17 | 9 | 0 | 30 | 21 | 54 | >10 |
| 472433 | 0 | 0 | 0 | 0 | 18 | 62 | >10 |
| 217328 | 29 | 28 | 45 | 65 | 76 | 83 | 1.4 |

TABLE 116

| | 0.3125 | | 1.25 | 2.50 | 5.00 | 10.00 | IC₅₀ |
|---|---|---|---|---|---|---|---|
| ISIS No | μM | 0.625 | μM | μM | μM | μM | (μM) |
| 413433 | 36 | 55 | 70 | 81 | 92 | 93 | <0.6 |
| 501094 | 43 | 60 | 76 | 85 | 90 | 90 | <0.6 |
| 501097 | 23 | 39 | 56 | 74 | 81 | 82 | 1.1 |
| 501098 | 56 | 70 | 83 | 92 | 90 | 91 | <0.6 |
| 501100 | 51 | 62 | 82 | 91 | 92 | 90 | <0.6 |
| 501103 | 58 | 65 | 77 | 86 | 93 | 92 | <0.6 |
| 501118 | 26 | 50 | 54 | 72 | 85 | 88 | 0.9 |
| 501122 | 28 | 40 | 59 | 69 | 85 | 84 | 1.0 |
| 501127 | 38 | 61 | 75 | 81 | 89 | 88 | <0.6 |
| 501165 | 34 | 24 | 59 | 70 | 85 | 82 | 1.1 |
| 501171 | 38 | 57 | 64 | 80 | 88 | 89 | <0.6 |
| 501214 | 36 | 50 | 68 | 84 | 83 | 85 | <0.6 |

TABLE 117

| | 0.3125 | 0.625 | 1.25 | 2.50 | 5.00 | 10.00 | IC₅₀ |
|---|---|---|---|---|---|---|---|
| ISIS No | μM | μM | μM | μM | μM | μM | (μM) |
| 413433 | 17 | 38 | 61 | 84 | 88 | 91 | 1.0 |
| 500998 | 37 | 57 | 74 | 84 | 90 | 92 | 0.4 |
| 501020 | 29 | 53 | 73 | 83 | 89 | 92 | 0.6 |
| 501033 | 9 | 27 | 45 | 66 | 76 | 80 | 1.7 |
| 501034 | 14 | 42 | 56 | 75 | 83 | 90 | 1.1 |
| 501035 | 39 | 61 | 77 | 86 | 86 | 86 | 0.3 |
| 501040 | 17 | 25 | 40 | 71 | 86 | 91 | 1.4 |
| 501041 | 49 | 66 | 80 | 81 | 85 | 83 | <0.3 |
| 501062 | 24 | 29 | 50 | 66 | 81 | 88 | 1.3 |
| 501064 | 45 | 51 | 73 | 84 | 85 | 85 | 0.4 |
| 501093 | 12 | 34 | 55 | 72 | 76 | 78 | 1.4 |
| 501111 | 14 | 26 | 43 | 65 | 69 | 78 | 1.9 |

TABLE 118

| | 0.3125 | 0.625 | 1.25 | 2.50 | 5.00 | 10.00 | IC₅₀ |
|---|---|---|---|---|---|---|---|
| ISIS No | μM | μM | μM | μM | μM | μM | (μM) |
| 413433 | 41 | 47 | 65 | 81 | 91 | 94 | 0.6 |
| 500841 | 32 | 38 | 67 | 75 | 83 | 84 | 0.8 |
| 500844 | 35 | 51 | 77 | 74 | 77 | 63 | 0.4 |
| 500852 | 35 | 38 | 63 | 79 | 88 | 89 | 0.8 |
| 500859 | 58 | 39 | 52 | 85 | 91 | 96 | 0.5 |
| 500867 | 21 | 54 | 46 | 88 | 90 | 93 | 0.8 |
| 500913 | 42 | 65 | 58 | 89 | 91 | 90 | 0.4 |
| 500942 | 32 | 31 | 50 | 86 | 92 | 95 | 0.9 |
| 500966 | 53 | 75 | 78 | 84 | 88 | 89 | <0.3 |
| 500989 | 32 | 69 | 74 | 90 | 87 | 86 | 0.3 |
| 501018 | 13 | 58 | 72 | 86 | 87 | 82 | 0.7 |
| 501067 | 7 | 63 | 45 | 77 | 88 | 94 | 1.0 |

TABLE 119

| | 0.3125 | 0.625 | 1.25 | 2.50 | 5.00 | 10.00 | IC₅₀ |
|---|---|---|---|---|---|---|---|
| ISIS No | μM | μM | μM | μM | μM | μM | (μM) |
| 413433 | 0 | 39 | 44 | 70 | 77 | 92 | 1.7 |
| 501385 | 0 | 9 | 30 | 25 | 37 | 63 | 7.0 |
| 501387 | 0 | 0 | 0 | 14 | 27 | 75 | 6.8 |
| 501404 | 28 | 37 | 48 | 59 | 61 | 83 | 1.5 |
| 501412 | 0 | 23 | 24 | 16 | 51 | 75 | 4.6 |
| 501427 | 3 | 18 | 50 | 41 | 68 | 92 | 2.1 |
| 501430 | 21 | 7 | 47 | 53 | 74 | 90 | 1.9 |
| 501442 | 35 | 39 | 65 | 72 | 92 | 94 | 0.8 |
| 501443 | 36 | 50 | 34 | 48 | 62 | 75 | 1.6 |
| 501447 | 21 | 9 | 49 | 56 | 74 | 90 | 1.8 |
| 501448 | 23 | 25 | 48 | 60 | 69 | 88 | 1.6 |
| 501450 | 27 | 36 | 28 | 31 | 52 | 77 | 3.4 |

TABLE 120

| | 0.3125 | 0.625 | 1.25 | 2.50 | 5.00 | 10.00 | IC₅₀ |
|---|---|---|---|---|---|---|---|
| ISIS No | μM | μM | μM | μM | μM | μM | (μM) |
| 413433 | 0 | 13 | 31 | 51 | 80 | 86 | 2.1 |
| 501391 | 0 | 9 | 15 | 7 | 46 | 67 | 8.6 |
| 501393 | 0 | 0 | 0 | 50 | 64 | 81 | 3.1 |
| 501398 | 0 | 5 | 0 | 0 | 41 | 58 | >10 |
| 501405 | 0 | 31 | 33 | 57 | 73 | 80 | 2.0 |
| 501429 | 5 | 10 | 0 | 2 | 40 | 62 | >10 |
| 501435 | 20 | 15 | 34 | 50 | 79 | 89 | 1.9 |
| 501438 | 12 | 39 | 30 | 64 | 83 | 89 | 1.6 |
| 501440 | 42 | 21 | 41 | 57 | 81 | 92 | 1.3 |
| 501451 | 0 | 0 | 19 | 39 | 67 | 84 | 3.5 |
| 501452 | 0 | 7 | 14 | 38 | 54 | 85 | 3.6 |
| 501454 | 12 | 4 | 1 | 19 | 65 | 82 | 4.2 |

TABLE 121

| | 0.3125 | 0.625 | 1.25 | 2.50 | 5.00 | 10.00 | IC₅₀ |
|---|---|---|---|---|---|---|---|
| ISIS No | μM | μM | μM | μM | μM | μM | (μM) |
| 413433 | 0 | 26 | 56 | 75 | 82 | 92 | 1.2 |
| 501388 | 0 | 15 | 28 | 63 | 86 | 88 | 1.8 |
| 501389 | 0 | 0 | 0 | 58 | 69 | 84 | 2.1 |
| 501390 | 0 | 33 | 0 | 0 | 73 | 86 | 2.0 |
| 501392 | 0 | 19 | 57 | 60 | 75 | 81 | 2.2 |
| 501396 | 0 | 13 | 0 | 53 | 81 | 83 | 2.3 |
| 501411 | 0 | 0 | 0 | 31 | 45 | 78 | 5.5 |
| 501428 | 14 | 0 | 14 | 38 | 74 | 81 | 3.2 |
| 501436 | 0 | 0 | 41 | 61 | 80 | 78 | 2.2 |
| 501449 | 0 | 0 | 35 | 56 | 71 | 82 | 2.7 |
| 501455 | 0 | 0 | 19 | 30 | 61 | 75 | 4.1 |
| 501457 | 18 | 0 | 23 | 39 | 63 | 87 | 3.1 |

TABLE 122

| | 0.3125 | 0.625 | 1.25 | 2.50 | 5.00 | 10.00 | IC₅₀ |
|---|---|---|---|---|---|---|---|
| ISIS No | μM | μM | μM | μM | μM | μM | (μM) |
| 413433 | 19 | 33 | 46 | 69 | 80 | 91 | 1.3 |
| 501154 | 24 | 22 | 33 | 42 | 74 | 81 | 2.2 |
| 501183 | 18 | 42 | 54 | 71 | 71 | 80 | 1.2 |
| 501199 | 23 | 22 | 44 | 68 | 80 | 79 | 1.5 |
| 501200 | 8 | 13 | 40 | 65 | 78 | 87 | 1.9 |
| 501212 | 39 | 32 | 24 | 52 | 65 | 70 | 2.3 |
| 501213 | 12 | 34 | 40 | 69 | 75 | 79 | 1.6 |
| 501224 | 36 | 33 | 53 | 65 | 74 | 81 | 1.1 |
| 501270 | 12 | 9 | 42 | 59 | 67 | 76 | 2.3 |
| 501287 | 2 | 24 | 33 | 46 | 71 | 80 | 2.5 |
| 501322 | 8 | 9 | 6 | 31 | 54 | 77 | 4.4 |
| 501345 | 10 | 17 | 21 | 50 | 55 | 81 | 3.0 |

TABLE 123

| | 0.3125 | 0.625 | 1.25 | 2.50 | 5.00 | 10.00 | IC₅₀ |
|---|---|---|---|---|---|---|---|
| ISIS No | μM | μM | μM | μM | μM | μM | (μM) |
| 413433 | 0 | 11 | 17 | 33 | 60 | 69 | 4.2 |
| 525395 | 18 | 18 | 15 | 47 | 49 | 69 | 4.4 |
| 525401 | 10 | 28 | 33 | 58 | 68 | 68 | 2.5 |
| 525402 | 0 | 9 | 23 | 43 | 62 | 73 | 3.5 |
| 525414 | 2 | 11 | 29 | 36 | 56 | 56 | 5.2 |
| 525415 | 22 | 0 | 21 | 39 | 49 | 73 | 4.7 |
| 525431 | 6 | 19 | 36 | 49 | 67 | 66 | 2.9 |
| 525442 | 13 | 0 | 23 | 44 | 56 | 81 | 3.4 |
| 525443 | 4 | 6 | 24 | 61 | 65 | 78 | 2.7 |
| 525469 | 28 | 38 | 50 | 69 | 79 | 85 | 1.1 |
| 525470 | 3 | 17 | 23 | 41 | 70 | 82 | 2.8 |
| 525501 | 0 | 5 | 34 | 31 | 58 | 79 | 3.5 |

TABLE 124

| | 0.3125 | 0.625 | 1.25 | 2.50 | 5.00 | 10.00 | IC₅₀ |
|---|---|---|---|---|---|---|---|
| ISIS No | μM | μM | μM | μM | μM | μM | (μM) |
| 413433 | 22 | 35 | 48 | 62 | 76 | 86 | 1.4 |
| 525468 | 11 | 30 | 21 | 61 | 72 | 83 | 2.1 |
| 525471 | 29 | 47 | 62 | 70 | 77 | 84 | 0.8 |
| 525472 | 23 | 35 | 54 | 70 | 81 | 81 | 1.2 |
| 525474 | 22 | 38 | 54 | 69 | 79 | 78 | 1.2 |
| 525479 | 25 | 26 | 35 | 63 | 75 | 84 | 1.6 |
| 525480 | 0 | 21 | 29 | 50 | 75 | 75 | 2.7 |
| 525500 | 4 | 23 | 39 | 60 | 80 | 87 | 1.8 |
| 525513 | 32 | 21 | 45 | 55 | 77 | 86 | 1.6 |
| 525551 | 15 | 31 | 38 | 8 | 84 | 90 | 2.3 |
| 525552 | 11 | 29 | 49 | 56 | 78 | 87 | 1.6 |
| 525554 | 16 | 7 | 31 | 62 | 68 | 79 | 2.3 |

TABLE 125

| | 0.3125 | 0.625 | 1.25 | 2.50 | 5.00 | 10.00 | IC₅₀ |
|---|---|---|---|---|---|---|---|
| ISIS No | μM | μM | μM | μM | μM | μM | (μM) |
| 413433 | 28 | 21 | 44 | 50 | 68 | 79 | 1.9 |
| 525544 | 0 | 3 | 22 | 41 | 52 | 63 | 4.8 |
| 525612 | 26 | 36 | 56 | 72 | 76 | 79 | 1.1 |
| 525631 | 0 | 8 | 26 | 54 | 77 | 82 | 2.7 |
| 525649 | 0 | 0 | 10 | 46 | 64 | 76 | 3.7 |
| 496041 | 14 | 9 | 8 | 31 | 53 | 65 | 5.7 |
| 525688 | 5 | 25 | 43 | 68 | 82 | 89 | 1.6 |
| 525705 | 27 | 30 | 48 | 69 | 82 | 90 | 1.2 |
| 525708 | 5 | 26 | 54 | 69 | 84 | 89 | 1.5 |
| 525711 | 14 | 28 | 49 | 67 | 81 | 88 | 1.4 |
| 525733 | 21 | 42 | 60 | 76 | 82 | 93 | 1.0 |
| 525754 | 0 | 17 | 34 | 55 | 79 | 85 | 2.2 |

### Example 10: Final Confirmation of Antisense Inhibition of Human DGAT2 in HepG2 Cells by MOE Gapmers

[0483] Gapmers from the studies described in the Examples above exhibiting significant in vitro inhibition of DGAT2 mRNA were selected and tested at various doses in HepG2 cells. Cells were plated at a density of 20,000 cells per well and transfected using electroporation with 0.3125 μM, 0.625 μM, 1.25 μM, 2.50 M, 5.00 μM, or 10.00 μM concentrations of antisense oligonucleotide, as specified in the Tables below. After a treatment period of approximately 16 hours, RNA was isolated from the cells and DGAT2 mRNA levels were measured by quantitative real-time PCR. Human primer probe set RTS2988_MGB was used to measure mRNA levels. DGAT2 mRNA levels were adjusted according to total RNA content, as measured by RIBOGREEN®. Results are presented as percent inhibition of DGAT2, relative to untreated control cells. ‘0’ indicates that the mRNA levels were not inhibited.

[0484] The half maximal inhibitory concentration (IC₅₀) of each oligonucleotide is also presented. DGAT2 mRNA levels were significantly reduced in a dose-dependent manner in antisense oligonucleotide treated cells.

TABLE 126

| | 0.3125 | 0.625 | 1.25 | 2.50 | 5.00 | 10.00 | IC₅₀ |
|---|---|---|---|---|---|---|---|
| ISIS No | μM | μM | μM | μM | μM | μM | (μM) |
| 413433 | 19 | 26 | 52 | 72 | 86 | 92 | 1.3 |
| 483817 | 18 | 31 | 60 | 74 | 86 | 90 | 1.1 |
| 483898 | 40 | 41 | 68 | 77 | 89 | 90 | 0.6 |
| 483908 | 21 | 47 | 63 | 83 | 89 | 92 | 0.8 |
| 484152 | 18 | 25 | 47 | 63 | 84 | 91 | 1.4 |
| 484181 | 42 | 45 | 73 | 81 | 87 | 86 | 0.5 |
| 484215 | 27 | 37 | 47 | 69 | 80 | 93 | 1.1 |
| 484231 | 16 | 33 | 58 | 71 | 83 | 89 | 1.2 |
| 472316 | 0 | 5 | 40 | 50 | 84 | 92 | 2.3 |
| 423463 | 17 | 34 | 55 | 80 | 90 | 93 | 1.1 |
| 484271 | 26 | 29 | 62 | 83 | 89 | 92 | 1.0 |
| 484283 | 7 | 12 | 30 | 50 | 79 | 90 | 2.2 |

TABLE 127

| | 0.3125 | 0.625 | 1.25 | 2.50 | 5.00 | 10.00 | IC₅₀ |
|---|---|---|---|---|---|---|---|
| ISIS No | μM | μM | μM | μM | μM | μM | (μM) |
| 413433 | 3 | 25 | 51 | 69 | 89 | 92 | 1.5 |
| 472158 | 18 | 25 | 26 | 44 | 71 | 80 | 2.4 |
| 483874 | 30 | 42 | 62 | 82 | 90 | 93 | 0.8 |
| 483910 | 20 | 30 | 49 | 74 | 85 | 90 | 1.2 |
| 483952 | 36 | 62 | 80 | 88 | 92 | 93 | 0.4 |
| 483968 | 8 | 35 | 57 | 73 | 86 | 91 | 1.2 |
| 483984 | 32 | 34 | 62 | 78 | 88 | 91 | 0.9 |
| 483987 | 12 | 10 | 36 | 61 | 80 | 92 | 1.9 |
| 483997 | 0 | 7 | 33 | 57 | 77 | 89 | 2.4 |
| 484085 | 25 | 24 | 53 | 72 | 87 | 89 | 1.2 |
| 484099 | 29 | 44 | 67 | 82 | 91 | 94 | 0.7 |
| 423453 | 19 | 24 | 46 | 62 | 88 | 95 | 1.4 |

TABLE 128

| | 0.3125 | 0.625 | 1.25 | 2.50 | 5.00 | 10.00 | IC₅₀ |
|---|---|---|---|---|---|---|---|
| ISIS No | μM | μM | μM | μM | μM | μM | (μM) |
| 413433 | 22 | 19 | 46 | 61 | 83 | 90 | 1.5 |
| 484127 | 16 | 18 | 54 | 74 | 90 | 95 | 1.3 |
| 484129 | 33 | 39 | 64 | 79 | 90 | 89 | 0.8 |
| 484130 | 30 | 29 | 52 | 66 | 85 | 92 | 1.1 |
| 484140 | 0 | 16 | 37 | 63 | 86 | 87 | 1.9 |
| 484133 | 1 | 2 | 44 | 71 | 83 | 93 | 1.8 |
| 484137 | 0 | 27 | 64 | 81 | 92 | 92 | 1.3 |
| 484148 | 16 | 37 | 67 | 79 | 91 | 94 | 1.0 |
| 484157 | 0 | 31 | 70 | 86 | 92 | 93 | 0.9 |
| 484170 | 23 | 40 | 57 | 77 | 90 | 94 | 1.0 |
| 484181 | 9 | 18 | 63 | 83 | 76 | 88 | 1.4 |
| 484343 | 18 | 21 | 40 | 72 | 88 | 91 | 1.4 |

TABLE 129

| | 0.3125 | 0.625 | 1.25 | 2.50 | 5.00 | 10.00 | IC₅₀ |
|---|---|---|---|---|---|---|---|
| ISIS No | μM | μM | μM | μM | μM | μM | (μM) |
| 413433 | 0 | 23 | 30 | 57 | 71 | 83 | 2.4 |
| 501849 | 22 | 33 | 46 | 65 | 79 | 87 | 1.4 |
| 501850 | 12 | 19 | 40 | 52 | 76 | 83 | 2.0 |
| 501852 | 17 | 25 | 47 | 63 | 68 | 77 | 1.8 |
| 501855 | 24 | 37 | 59 | 78 | 82 | 84 | 1.0 |
| 501861 | 15 | 23 | 45 | 61 | 77 | 84 | 1.7 |
| 501871 | 14 | 19 | 39 | 57 | 71 | 85 | 2.0 |
| 501884 | 14 | 25 | 42 | 57 | 74 | 83 | 1.9 |
| 501886 | 30 | 40 | 47 | 58 | 70 | 73 | 1.4 |
| 501932 | 8 | 24 | 28 | 55 | 68 | 78 | 2.4 |
| 501944 | 6 | 31 | 0 | 44 | 67 | 82 | 3.3 |
| 501950 | 0 | 14 | 19 | 55 | 79 | 85 | 2.4 |

TABLE 130

| | 0.3125 | 0.625 | 1.25 | 2.50 | 5.00 | 10.00 | IC₅₀ |
|---|---|---|---|---|---|---|---|
| ISIS No | μM | μM | μM | μM | μM | μM | (μM) |
| 413433 | 31 | 43 | 53 | 74 | 80 | 84 | 0.9 |
| 502154 | 29 | 46 | 68 | 81 | 86 | 91 | 0.7 |
| 502163 | 22 | 33 | 55 | 71 | 89 | 97 | 1.1 |
| 502164 | 20 | 32 | 71 | 72 | 85 | 91 | 1.0 |
| 502179 | 28 | 50 | 67 | 84 | 81 | 90 | 0.7 |
| 502191 | 29 | 47 | 64 | 74 | 94 | 97 | 0.7 |
| 502194 | 24 | 23 | 62 | 78 | 90 | 90 | 1.1 |
| 502314 | 25 | 14 | 21 | 44 | 66 | 85 | 2.6 |
| 502319 | 20 | 32 | 56 | 78 | 86 | 92 | 1.1 |
| 502322 | 17 | 35 | 49 | 68 | 79 | 83 | 1.4 |
| 502331 | 11 | 22 | 11 | 45 | 60 | 82 | 3.1 |
| 502334 | 35 | 40 | 59 | 69 | 82 | 92 | 0.8 |

TABLE 131

| | 0.3125 | 0.625 | 1.25 | 2.50 | 5.00 | 10.00 | IC₅₀ |
|---|---|---|---|---|---|---|---|
| ISIS No | μM | μM | μM | μM | μM | μM | (μM) |
| 413433 | 13 | 16 | 25 | 38 | 59 | 75 | 3.5 |
| 495702 | 29 | 37 | 49 | 65 | 78 | 80 | 1.2 |
| 495718 | 21 | 34 | 28 | 56 | 71 | 77 | 2.0 |
| 495756 | 23 | 40 | 56 | 76 | 87 | 95 | 1.0 |
| 507692 | 20 | 33 | 56 | 68 | 89 | 91 | 1.1 |
| 507693 | 28 | 38 | 56 | 79 | 89 | 94 | 0.9 |
| 507694 | 19 | 30 | 45 | 72 | 87 | 94 | 1.3 |
| 507695 | 28 | 32 | 44 | 70 | 84 | 92 | 1.2 |
| 507696 | 18 | 37 | 59 | 78 | 88 | 90 | 1.0 |
| 507710 | 27 | 39 | 52 | 73 | 91 | 92 | 1.0 |
| 507716 | 32 | 51 | 52 | 68 | 88 | 93 | 0.8 |
| 507717 | 31 | 49 | 44 | 66 | 84 | 90 | 1.0 |

TABLE 132

| | 0.3125 | 0.625 | 1.25 | 2.50 | 5.00 | 10.00 | IC₅₀ |
|---|---|---|---|---|---|---|---|
| ISIS No | μM | μM | μM | μM | μM | μM | (μM) |
| 413433 | 0 | 43 | 64 | 80 | 84 | 90 | 1.2 |
| 501947 | 7 | 23 | 42 | 65 | 79 | 89 | 1.7 |
| 501951 | 13 | 25 | 45 | 68 | 85 | 92 | 1.5 |
| 501959 | 8 | 29 | 38 | 66 | 74 | 90 | 1.7 |
| 501960 | 14 | 22 | 41 | 68 | 75 | 88 | 1.7 |
| 501968 | 17 | 33 | 44 | 59 | 88 | 87 | 1.4 |
| 502038 | 0 | 7 | 8 | 36 | 58 | 84 | 3.7 |
| 502045 | 13 | 38 | 53 | 67 | 81 | 88 | 1.3 |
| 502056 | 0 | 31 | 66 | 83 | 88 | 91 | 1.2 |
| 502098 | 9 | 35 | 48 | 72 | 86 | 93 | 1.3 |
| 502099 | 9 | 31 | 52 | 74 | 82 | 92 | 1.3 |
| 502119 | 1 | 45 | 61 | 79 | 89 | 95 | 1.1 |

TABLE 133

| | 0.3125 | 0.625 | 1.25 | 2.50 | 5.00 | 10.00 | IC₅₀ |
|---|---|---|---|---|---|---|---|
| ISIS No | μM | μM | μM | uM | μM | μM | (μM) |
| 413433 | 0 | 43 | 59 | 69 | 84 | 90 | 1.1 |
| 495697 | 15 | 32 | 50 | 66 | 78 | 79 | 1.5 |
| 495705 | 25 | 37 | 53 | 59 | 76 | 79 | 1.3 |
| 495719 | 21 | 30 | 44 | 64 | 76 | 84 | 1.5 |
| 501388 | 13 | 34 | 44 | 62 | 71 | 87 | 1.6 |
| 501389 | 11 | 44 | 47 | 54 | 80 | 91 | 1.4 |
| 501392 | 0 | 25 | 42 | 51 | 75 | 87 | 1.9 |
| 501396 | 19 | 31 | 52 | 66 | 76 | 87 | 1.4 |
| 501428 | 0 | 0 | 33 | 46 | 63 | 85 | 2.8 |
| 501436 | 4 | 28 | 23 | 57 | 76 | 88 | 2.1 |
| 501449 | 19 | 21 | 42 | 59 | 75 | 92 | 1.7 |
| 501457 | 7 | 29 | 35 | 50 | 75 | 92 | 1.9 |

TABLE 134

| | 0.3125 | 0.625 | 1.25 | 2.50 | 5.00 | 10.00 | IC₅₀ |
|---|---|---|---|---|---|---|---|
| ISIS No | μM | μM | μM | μM | μM | μM | (μM) |
| 413433 | 13 | 35 | 53 | 73 | 83 | 87 | 1.3 |
| 522373 | 19 | 34 | 54 | 72 | 83 | 84 | 1.2 |
| 522374 | 13 | 31 | 54 | 65 | 79 | 85 | 1.4 |
| 522383 | 23 | 44 | 62 | 72 | 76 | 81 | 1.0 |
| 522435 | 25 | 39 | 55 | 73 | 81 | 80 | 1.1 |
| 522437 | 26 | 35 | 56 | 70 | 81 | 85 | 1.1 |
| 522440 | 14 | 33 | 50 | 67 | 77 | 82 | 1.5 |
| 522444 | 24 | 35 | 57 | 78 | 83 | 89 | 1.0 |
| 522445 | 25 | 45 | 57 | 69 | 83 | 86 | 1.0 |
| 522465 | 14 | 15 | 40 | 55 | 75 | 82 | 2.0 |
| 522484 | 37 | 0 | 72 | 75 | 76 | 74 | 1.3 |
| 522501 | 25 | 45 | 55 | 72 | 78 | 76 | 1.0 |

TABLE 135

| | 0.3125 | 0.625 | 1.25 | 2.50 | 5.00 | 10.00 | IC₅₀ |
|---|---|---|---|---|---|---|---|
| ISIS No | μM | μM | μM | μM | μM | μM | (μM) |
| 413433 | 25 | 36 | 50 | 79 | 83 | 87 | 1.1 |
| 522580 | 27 | 34 | 55 | 62 | 86 | 85 | 1.1 |
| 522587 | 35 | 40 | 56 | 73 | 88 | 92 | 0.8 |
| 522589 | 27 | 40 | 56 | 71 | 82 | 91 | 1.0 |
| 522609 | 37 | 48 | 70 | 82 | 94 | 93 | 0.5 |
| 522621 | 20 | 35 | 55 | 74 | 86 | 91 | 1.1 |
| 522632 | 31 | 52 | 66 | 80 | 90 | 93 | 0.6 |
| 522643 | 16 | 28 | 48 | 67 | 78 | 87 | 1.5 |
| 522688 | 16 | 38 | 57 | 75 | 76 | 89 | 1.2 |
| 522689 | 29 | 34 | 58 | 78 | 84 | 91 | 0.9 |
| 522717 | 18 | 24 | 50 | 72 | 82 | 88 | 1.4 |
| 522745 | 22 | 35 | 57 | 75 | 89 | 92 | 1.0 |

TABLE 136

| | 0.3125 | 0.625 | 1.25 | 2.50 | 5.00 | 10.00 | IC₅₀ |
|---|---|---|---|---|---|---|---|
| ISIS No | μM | μM | μM | μM | μM | μM | (μM) |
| 413433 | 23 | 32 | 45 | 74 | 78 | 88 | 1.3 |
| 522682 | 26 | 34 | 63 | 68 | 74 | 81 | 1.1 |
| 522770 | 8 | 26 | 50 | 65 | 83 | 91 | 1.5 |
| 522889 | 25 | 40 | 59 | 70 | 77 | 78 | 1.1 |
| 522897 | 14 | 22 | 45 | 69 | 83 | 89 | 1.5 |
| 522913 | 19 | 30 | 57 | 73 | 86 | 90 | 1.2 |
| 522941 | 8 | 18 | 41 | 56 | 73 | 82 | 2.1 |
| 522942 | 20 | 30 | 49 | 67 | 83 | 86 | 1.3 |
| 522947 | 14 | 0 | 40 | 58 | 80 | 91 | 2.0 |
| 522964 | 9 | 20 | 51 | 63 | 78 | 89 | 1.7 |
| 495878 | 16 | 36 | 62 | 80 | 90 | 93 | 1.0 |
| 523002 | 21 | 32 | 51 | 67 | 73 | 84 | 1.4 |

TABLE 137

| | 0.3125 | 0.625 | 1.25 | 2.50 | 5.00 | 10.00 | IC₅₀ |
|---|---|---|---|---|---|---|---|
| ISIS No | μM | μM | μM | μM | μM | μM | (μM) |
| 413433 | 40 | 35 | 66 | 81 | 87 | 89 | 0.7 |
| 525401 | 17 | 58 | 64 | 79 | 85 | 86 | 0.8 |
| 525402 | 30 | 41 | 49 | 74 | 87 | 90 | 0.9 |
| 525431 | 31 | 29 | 64 | 82 | 86 | 84 | 0.9 |
| 525442 | 35 | 39 | 59 | 76 | 90 | 87 | 0.8 |
| 525443 | 39 | 53 | 64 | 76 | 88 | 89 | 0.5 |
| 525469 | 32 | 68 | 85 | 93 | 92 | 93 | 0.3 |
| 525470 | 39 | 34 | 59 | 74 | 91 | 89 | 0.8 |
| 525471 | 27 | 34 | 59 | 84 | 86 | 0 | 0.9 |
| 525474 | 32 | 47 | 69 | 80 | 93 | 87 | 0.6 |
| 525479 | 25 | 33 | 51 | 60 | 75 | 75 | 1.5 |
| 525501 | 31 | 29 | 56 | 82 | 91 | 88 | 1.0 |

TABLE 138

| | 0.3125 | 0.625 | 1.25 | 2.50 | 5.00 | 10.00 | IC₅₀ |
|---|---|---|---|---|---|---|---|
| ISIS No | μM | μM | μM | μM | μM | μM | (μM) |
| 413433 | 22 | 41 | 54 | 69 | 81 | 88 | 1.1 |
| 525472 | 26 | 31 | 50 | 69 | 84 | 82 | 1.2 |
| 525500 | 11 | 33 | 52 | 68 | 83 | 83 | 1.4 |
| 525513 | 16 | 20 | 48 | 64 | 79 | 87 | 1.6 |
| 525552 | 27 | 30 | 57 | 70 | 83 | 90 | 1.1 |
| 525612 | 0 | 44 | 65 | 76 | 83 | 82 | 0.3 |
| 525688 | 11 | 40 | 60 | 75 | 88 | 97 | 1.1 |
| 525705 | 25 | 41 | 65 | 76 | 90 | 95 | 0.8 |
| 525708 | 36 | 38 | 64 | 75 | 93 | 96 | 0.7 |
| 525711 | 24 | 53 | 67 | 80 | 90 | 94 | 0.7 |
| 525733 | 27 | 70 | 73 | 86 | 91 | 95 | 0.4 |
| 525754 | 23 | 23 | 48 | 70 | 85 | 89 | 1.3 |

### Example 11: Final Confirmation of Antisense Inhibition of Human DGAT2 in HepG2 Cells by MOE Gapmers

[0485] Gapmers from the studies described in the Examples above exhibiting significant in vitro inhibition of DGAT2 mRNA were selected and tested at various doses in HepG2 cells. Cells were plated at a density of 20,000 cells per well and transfected using electroporation with 0.625 μM, 1.25 μM, 2.50 μM, 5.00 μM, or 10.00 μM concentrations of antisense oligonucleotide, as specified in the Tables below. After a treatment period of approximately 16 hours, RNA was isolated from the cells and DGAT2 mRNA levels were measured by quantitative real-time PCR. Human primer probe set RTS2988_MGB was used to measure mRNA levels. DGAT2 mRNA levels were adjusted according to total RNA content, as measured by RIBOGREEN®. Results are presented as percent inhibition of DGAT2, relative to untreated control cells. ‘0’ indicates that the mRNA levels were not inhibited.

[0486] The half maximal inhibitory concentration (IC₅₀) of each oligonucleotide is also presented. DGAT2 mRNA levels were significantly reduced in a dose-dependent manner in antisense oligonucleotide treated cells.

TABLE 139

| | 0.625 | 1.25 | 2.50 | 5.00 | 10.00 | IC₅₀ |
|---|---|---|---|---|---|---|
| ISIS No | μM | μM | μM | μM | μM | (μM) |
| 413433 | 48 | 60 | 77 | 85 | 86 | 0.6 |
| 495450 | 42 | 50 | 73 | 83 | 83 | 1.0 |
| 495516 | 64 | 78 | 87 | 84 | 84 | <0.6 |
| 495520 | 70 | 76 | 87 | 83 | 82 | <0.6 |
| 495554 | 26 | 61 | 75 | 76 | 85 | 1.1 |
| 495555 | 30 | 72 | 80 | 87 | 84 | 0.8 |
| 495576 | 61 | 73 | 86 | 88 | 88 | <0.6 |
| 495577 | 44 | 64 | 75 | 85 | 80 | 0.6 |
| 495609 | 64 | 69 | 83 | 86 | 89 | <0.6 |
| 495685 | 0 | 53 | 75 | 82 | 85 | 2.0 |
| 495707 | 9 | 41 | 72 | 75 | 66 | 2.2 |
| 495736 | 16 | 61 | 80 | 85 | 81 | 1.3 |
| 495749 | 16 | 33 | 76 | 90 | 93 | 1.7 |
| 495752 | 0 | 66 | 75 | 74 | 93 | 1.7 |
| 495753 | 0 | 59 | 79 | 91 | 92 | 1.8 |

TABLE 140

| | 0.625 | 1.25 | 2.50 | 5.00 | 10.00 | IC₅₀ |
|---|---|---|---|---|---|---|
| ISIS No | μM | μM | μM | μM | μM | (μM) |
| 413433 | 54 | 70 | 87 | 91 | 93 | <0.6 |
| 495738 | 55 | 57 | 81 | 92 | 92 | <0.6 |
| 495744 | 37 | 59 | 78 | 88 | 90 | 0.9 |
| 495756 | 52 | 61 | 80 | 90 | 94 | <0.6 |
| 495825 | 34 | 69 | 89 | 94 | 97 | 0.7 |
| 495829 | 38 | 79 | 88 | 90 | 91 | <0.6 |
| 495837 | 52 | 67 | 93 | 93 | 96 | <0.6 |
| 495839 | 66 | 89 | 91 | 93 | 93 | <0.6 |
| 495840 | 64 | 84 | 94 | 96 | 94 | <0.6 |
| 495841 | 51 | 82 | 90 | 92 | 93 | <0.6 |
| 495842 | 54 | 73 | 88 | 90 | 92 | <0.6 |
| 495849 | 63 | 69 | 82 | 85 | 91 | <0.6 |
| 495853 | 72 | 77 | 91 | 96 | 94 | <0.6 |
| 495857 | 52 | 61 | 88 | 91 | 92 | <0.6 |
| 495878 | 54 | 77 | 93 | 97 | 96 | <0.6 |

TABLE 141

| | 0.625 | 1.25 | 2.50 | 5.00 | 10.00 | IC₅₀ |
|---|---|---|---|---|---|---|
| ISIS No | μM | μM | μM | μM | μM | (μM) |
| 413433 | 38 | 63 | 73 | 85 | 88 | 0.8 |
| 501171 | 38 | 53 | 69 | 83 | 84 | 1.0 |
| 501183 | 51 | 70 | 79 | 87 | 89 | <0.6 |
| 501199 | 44 | 68 | 88 | 91 | 87 | <0.6 |
| 501213 | 25 | 57 | 82 | 93 | 96 | 1.1 |
| 501214 | 35 | 56 | 72 | 88 | 92 | 1.0 |
| 501224 | 48 | 68 | 83 | 90 | 90 | <0.6 |
| 501405 | 27 | 51 | 72 | 90 | 96 | 1.3 |
| 501430 | 10 | 26 | 65 | 90 | 94 | 2.0 |
| 501435 | 35 | 41 | 71 | 92 | 94 | 1.3 |
| 501438 | 27 | 71 | 83 | 92 | 92 | 0.9 |
| 501440 | 24 | 40 | 66 | 90 | 97 | 1.6 |
| 501442 | 58 | 79 | 91 | 96 | 94 | <0.6 |
| 501443 | 32 | 29 | 57 | 89 | 96 | 1.7 |
| 501448 | 27 | 46 | 72 | 91 | 93 | 1.4 |

TABLE 142

| | 0.625 | 1.25 | 2.50 | 5.00 | 10.00 | IC₅₀ |
|---|---|---|---|---|---|---|
| ISIS No | μM | μM | μM | μM | μM | (μM) |
| 413433 | 43 | 58 | 82 | 91 | 94 | 0.8 |
| 501127 | 46 | 68 | 81 | 91 | 92 | <0.6 |
| 501103 | 34 | 70 | 85 | 93 | 91 | 0.7 |
| 501100 | 54 | 75 | 88 | 93 | 94 | <0.6 |
| 501098 | 55 | 81 | 91 | 91 | 89 | <0.6 |
| 501094 | 62 | 70 | 87 | 90 | 92 | <0.6 |
| 501064 | 52 | 67 | 81 | 88 | 89 | <0.6 |
| 501041 | 53 | 71 | 82 | 86 | 85 | <0.6 |
| 501035 | 57 | 77 | 87 | 88 | 90 | <0.6 |
| 501020 | 47 | 63 | 86 | 94 | 94 | 0.6 |
| 500998 | 47 | 61 | 86 | 91 | 95 | 0.6 |
| 500989 | 55 | 75 | 83 | 86 | 85 | <0.6 |
| 500966 | 71 | 82 | 85 | 87 | 87 | <0.6 |
| 500913 | 29 | 46 | 74 | 85 | 88 | 1.3 |
| 500859 | 6 | 44 | 75 | 87 | 90 | 1.8 |

### Example 12: Tolerability of Antisense Oligonucleotides Targeting Human DGAT2 in CD1 Mice

[0487] CD1® mice (Charles River, MA) are a multipurpose mice model, frequently utilized for safety and efficacy testing. The mice were treated with ISIS antisense oligonucleotides selected from studies described above and evaluated for changes in the levels of various plasma chemistry markers. Liver and kidney tissue from the treated mice were microscopically reviewed; no toxicity or tissue injury was seen in any treated animal.

### Treatment

[0488] Groups of five male CD1 mice each were injected subcutaneously twice a week for 6 weeks with 100 mg/kg (200 mg/kg/week) of ISIS oligonucleotide. One group of ten male CD1 mice was injected subcutaneously twice a week for 6 weeks with PBS. Mice were euthanized 48 hours after the last dose, and organs and plasma were harvested for further analysis.

### Plasma Chemistry Markers

[0489] To evaluate the effect of ISIS oligonucleotides on liver and kidney function, plasma levels of transaminases, bilirubin, albumin, and BUN were measured on day 27 using an automated clinical chemistry analyzer (Hitachi Olympus AU400e, Melville, NY). The results are presented in the Table below. ISIS oligonucleotides that caused changes in the levels of any of the liver or kidney function markers outside the expected range for antisense oligonucleotides were excluded in further studies.

TABLE 143
Plasma chemistry markers in CD1 mice

| | ALT | AST | BUN | Bilirubin |
|---|---|---|---|---|
| | (IU/L) | (IU/L) | (mg/dL) | (mg/dL) |
| PBS | 33 | 50 | 30 | 0.3 |
| ISIS 483984 | 193 | 177 | 30 | 0.3 |
| ISIS 484099 | 69 | 77 | 23 | 0.2 |
| ISIS 484129 | 43 | 46 | 24 | 0.2 |
| ISIS 484157 | 136 | 105 | 26 | 0.2 |
| ISIS 495576 | 36 | 53 | 30 | 0.3 |
| ISIS 495609 | 102 | 112 | 28 | 0.3 |
| ISIS 495753 | 68 | 76 | 28 | 0.2 |
| ISIS 495756 | 154 | 123 | 26 | 0.3 |
| ISIS 501849 | 45 | 58 | 26 | 0.2 |
| ISIS 501850 | 294 | 306 | 26 | 0.3 |
| ISIS 501855 | 62 | 56 | 28 | 0.2 |
| ISIS 501861 | 100 | 97 | 30 | 0.3 |
| ISIS 502322 | 42 | 46 | 28 | 0.2 |
| ISIS 507696 | 99 | 132 | 30 | 0.2 |
| ISIS 507710 | 50 | 68 | 27 | 0.3 |
| ISIS 507716 | 3112 | 3302 | 19 | 7.8 |

### Body and Organ Weights

[0490] Body weights of the mice were measured on day 35 and are presented in the Table below. Liver, spleen and kidney weights were measured at the end of the study (day 41), and are also presented in the Table below. ISIS oligonucleotides that caused any changes in body or organ weights outside the expected range for antisense oligonucleotides were excluded from further studies. ‘n/a’ indicates that the particular endpoint was not measured in that group of mice.

TABLE 144
Body and organ weights of CD1 mice (g)

| | Body | | | |
|---|---|---|---|---|
| | weight | Kidney | Liver | Spleen |
| PBS | 41.2 | 0.7 | 2.0 | 0.1 |
| ISIS 483984 | 41.0 | n/a | n/a | n/a |
| ISIS 484129 | 41.0 | 0.6 | 2.1 | 0.2 |
| ISIS 484157 | 38.8 | n/a | n/a | n/a |
| ISIS 495576 | 41.4 | 0.6 | 2.1 | 0.2 |
| ISIS 495609 | 42.5 | 0.6 | 2.1 | 0.2 |
| ISIS 495753 | 40.0 | 0.5 | 2.2 | 0.2 |
| ISIS 495756 | 42.0 | 0.7 | 2.6 | 0.2 |
| ISIS 501849 | 42.3 | 0.6 | 2.4 | 0.2 |
| ISIS 501850 | 41.7 | 0.7 | 2.5 | 0.2 |
| ISIS 501855 | 39.9 | n/a | n/a | n/a |
| ISIS 501861 | 40.3 | 0.6 | 2.3 | 0.2 |
| ISIS 502322 | 41.1 | 0.7 | 2.2 | 0.2 |
| ISIS 507696 | 38.9 | 0.6 | 2.3 | 0.2 |
| ISIS 507710 | 42.7 | 0.6 | 2.5 | 0.2 |

### Example 13: Tolerability of Antisense Oligonucleotides Targeting Human DGAT2 in CD1 Mice

[0491] CD1® mice were treated with ISIS antisense oligonucleotides selected from studies described above and evaluated for changes in the levels of various plasma chemistry markers.

### Treatment

[0492] Groups of five male CD1 mice each were injected subcutaneously twice a week for 6 weeks with 50 mg/kg of ISIS 483817, ISIS 483910, ISIS 484085, ISIS 484127, ISIS 484130, ISIS 484137, ISIS 484215, ISIS 484231, ISIS 484271, ISIS 501871, ISIS 502098, ISIS 502119, ISIS 502154, ISIS 502163, ISIS 502164, ISIS 502194, ISIS 525443, ISIS 525474, ISIS 525552, ISIS 525612, ISIS 525688, ISIS 525705, ISIS 525708, ISIS 525711, and ISIS 525733. One group of ten male CD1 mice was injected subcutaneously twice a week for 6 weeks with PBS. Mice were euthanized 48 hours after the last dose, and organs and plasma were harvested for further analysis.

### Plasma Chemistry Markers

[0493] To evaluate the effect of ISIS oligonucleotides on liver and kidney function, plasma levels of transaminases, bilirubin, albumin, and BUN were measured on day 26 using an automated clinical chemistry analyzer (Hitachi Olympus AU400e, Melville, NY). The results are presented in the Table below. ISIS oligonucleotides that caused changes in the levels of any of the liver or kidney function markers outside the expected range for antisense oligonucleotides were excluded in further studies.

TABLE 145
Plasma chemistry markers in CD1 mice

| | ALT | AST | BUN | Bilirubin |
|---|---|---|---|---|
| | (IU/L) | (IU/L) | (mg/dL) | (mg/dL) |
| PBS | 26 | 55 | 29 | 0.6 |
| ISIS 483817 | 40 | 54 | 27 | 0.3 |
| ISIS 483910 | 244 | 155 | 28 | 0.6 |
| ISIS 484085 | 46 | 58 | 27 | 0.4 |
| ISIS 484127 | 100 | 147 | 25 | 0.4 |
| ISIS 484130 | 151 | 91 | 29 | 0.3 |
| ISIS 484137 | 31 | 49 | 26 | 0.3 |
| ISIS 484215 | 42 | 49 | 25 | 0.2 |
| ISIS 484231 | 31 | 45 | 26 | 0.2 |
| ISIS 484271 | 2847 | 3267 | 26 | 2.9 |
| ISIS 501871 | 108 | 96 | 23 | 0.2 |
| ISIS 502098 | 60 | 62 | 24 | 0.3 |
| ISIS 502119 | 402 | 370 | 26 | 0.3 |
| ISIS 502154 | 293 | 294 | 28 | 0.3 |
| ISIS 502163 | 45 | 60 | 23 | 0.4 |
| ISIS 502164 | 81 | 75 | 25 | 0.4 |
| ISIS 502194 | 32 | 43 | 24 | 0.4 |
| ISIS 525443 | 93 | 101 | 24 | 0.3 |
| ISIS 525474 | 49 | 94 | 24 | 0.6 |
| ISIS 525552 | 1374 | 874 | 25 | 0.3 |
| ISIS 525612 | 78 | 54 | 27 | 0.4 |
| ISIS 525705 | 76 | 117 | 31 | 0.3 |
| ISIS 525708 | 59 | 79 | 29 | 0.3 |
| ISIS 525711 | 1670 | 787 | 26 | 0.3 |

### Body and Organ Weights

[0494] Body weights of the mice were measured on day 36 and are presented in the Table below. Liver, spleen and kidney weights were measured at the end of the study, and are also presented in the Table below. ISIS oligonucleotides that caused any changes in body or organ weights outside the expected range for antisense oligonucleotides were excluded from further studies. ‘n/a’ indicates that the particular endpoint was not measured in that group of mice.

TABLE 146
Body and organ weights of CD1 mice (g)

| | Body | | | |
|---|---|---|---|---|
| | weight | Kidney | Liver | Spleen |
| PBS | 39.4 | 0.7 | 2.0 | 0.1 |
| ISIS 483817 | 38.8 | 0.6 | 2.3 | 0.2 |
| ISIS 483910 | 39.2 | 0.6 | 2.3 | 0.2 |
| ISIS 484085 | 37.9 | 0.6 | 2.3 | 0.1 |
| ISIS 484127 | 35.3 | n/a | n/a | n/a |
| ISIS 484130 | 41.5 | n/a | n/a | n/a |
| ISIS 484137 | 39.6 | 0.7 | 2.3 | 0.1 |
| ISIS 484215 | 38.5 | 0.6 | 2.4 | 0.2 |
| ISIS 484231 | 38.3 | 0.6 | 2.1 | 0.1 |
| ISIS 501871 | 38.7 | 0.6 | 2.3 | 0.2 |
| ISIS 502098 | 38.8 | 0.6 | 2.5 | 0.2 |
| ISIS 502163 | 39.1 | 0.6 | 2.0 | 0.2 |
| ISIS 502164 | 37.7 | 0.6 | 2.1 | 0.2 |
| ISIS 502194 | 40.5 | 0.6 | 1.9 | 0.1 |
| ISIS 525443 | 39.5 | 0.6 | 2.0 | 0.2 |
| ISIS 525474 | 37.0 | 0.6 | 1.8 | 0.1 |
| ISIS 525612 | 37.8 | 0.6 | 2.0 | 0.1 |
| ISIS 525705 | 36.5 | 0.7 | 2.0 | 0.4 |
| ISIS 525708 | 38.7 | 0.7 | 2.0 | 0.3 |

### Example 14: Tolerability of Antisense Oligonucleotides Targeting Human DGAT2 in Sprague-Dawley Rats

[0495] Sprague-Dawley rats are a multipurpose model used for safety and efficacy evaluations. The rats were treated with ISIS antisense oligonucleotides from the study described above and evaluated for changes in the levels of various plasma chemistry markers.

### Treatment

[0496] Male Sprague-Dawley rats were maintained on a 12-hour light/dark cycle and fed ad libitum with Purina normal rat chow, diet 5001. Groups of 4 Sprague-Dawley rats each were injected subcutaneously twice a week for 8 weeks with 50 mg/kg of ISIS 484129, ISIS 495576, ISIS 495609, ISIS 495753, ISIS 495756, ISIS 501849, ISIS 501850, ISIS 501861, ISIS 502322, ISIS 507696, and ISIS 507710. Forty eight hours after the last dose, rats were euthanized and organs and plasma were harvested for further analysis.

### Liver Function

[0497] To evaluate the effect of ISIS oligonucleotides on hepatic function, plasma levels of transaminases were measured on day 56 using an automated clinical chemistry analyzer (Hitachi Olympus AU400e, Melville, NY). Plasma levels of ALT and AST were measured and the results are presented in the Table below expressed in IU/L. Plasma levels of Bilirubin were also measured using the same clinical chemistry analyzer and the results are also presented in the Table below. ISIS oligonucleotides that caused changes in the levels of any markers of liver function outside the expected range for antisense oligonucleotides were excluded in further studies.

TABLE 147
Liver function markers in Sprague-Dawley rats

| | ALT | AST | Bilirubin |
|---|---|---|---|
| | (IU/L) | TU/L) | (mg/dL) |
| PBS | 49 | 70 | 0.16 |
| ISIS 484129 | 133 | 130 | 0.18 |
| ISIS 495576 | 99 | 148 | 0.17 |
| ISIS 495609 | 406 | 269 | 0.32 |
| ISIS 495753 | 968 | 1258 | 1.83 |
| ISIS 495756 | 165 | 206 | 0.24 |
| ISIS 501849 | 57 | 103 | 0.16 |
| ISIS 501850 | 1218 | 1916 | 6.55 |
| ISIS 501861 | 61 | 113 | 0.14 |
| ISIS 502322 | 79 | 84 | 0.14 |

### Kidney Function

[0498] To evaluate the effect of ISIS oligonucleotides on kidney function, urine levels of creatinine and total protein were measured on day 56 using an automated clinical chemistry analyzer (Hitachi Olympus AU400e, Melville, NY). Results are presented in the Table below, expressed in mg/dL.

TABLE 148
Kidney function markers (mg/dL) in Sprague-Dawley rats

| | | Total |
|---|---|---|
| | Creatinine | protein |
| PBS | 146 | 114 |
| ISIS 495756 | 63 | 978 |
| ISIS 501849 | 82 | 445 |
| ISIS 501861 | 67 | 309 |
| ISIS 501850 | 52 | 268 |
| ISIS 502322 | 84 | 507 |
| ISIS 495576 | 108 | 587 |
| ISIS 495609 | 38 | 264 |
| ISIS 495753 | 73 | 411 |
| ISIS 484129 | 66 | 312 |

### Body and Organ Weights

[0499] Body weights of the rat were measured on day 50 and are presented in the Table below. Liver, heart, spleen and kidney weights were measured at the end of the study, and are also presented in the Table below. ISIS oligonucleotides that caused any changes in body or organ weights outside the expected range for antisense oligonucleotides were excluded from further studies. ‘n/a’ indicates that the particular endpoint was not measured in that group of mice.

TABLE 149
Body and organ weights of Sprague-Dawley rats (g)

| | Body | | | | |
|---|---|---|---|---|---|
| | weight | Heart | Kidney | Liver | Spleen |
| PBS | 486 | 1.7 | 3.5 | 14.2 | 0.7 |
| ISIS 495756 | 374 | 1.1 | 3.5 | 15.5 | 2.2 |
| ISIS 501849 | 404 | 1.2 | 3.3 | 13.7 | 1.9 |
| ISIS 501861 | 390 | 1.1 | 3.6 | 16.0 | 2.7 |
| ISIS 501850 | 329 | 1.3 | 4.1 | 16.3 | 4.5 |
| ISIS 502322 | 424 | 1.3 | 3.4 | 15.6 | 1.7 |
| ISIS 495576 | 461 | 1.3 | 3.5 | 17.3 | 2.1 |
| ISIS 495609 | 383 | 1.4 | 3.8 | 18.9 | 3.8 |
| ISIS 495753 | 384 | 1.2 | 3.4 | 16.3 | 3.6 |
| ISIS 484129 | 415 | 1.3 | 3.1 | 14.9 | 1.5 |

### Example 15: Tolerability of Antisense Oligonucleotides Targeting Human DGAT2 in Sprague-Dawley Rats

[0500] Sprague-Dawley rats were treated with ISIS antisense oligonucleotides from the studies described above and evaluated for changes in the levels of various plasma chemistry markers.

### Treatment

[0501] Male Sprague-Dawley rats were maintained on a 12-hour light/dark cycle and fed ad libitum with Purina normal rat chow, diet 5001. Groups of 4 Sprague-Dawley rats each were injected subcutaneously twice a week for 8 weeks with 50 mg/kg of ISIS 483817, ISIS 483910, ISIS 484085, ISIS 484137, ISIS 484215, ISIS 484231, ISIS 501871, ISIS 502098, ISIS 502163, ISIS 502164, ISIS 502194, ISIS 525443, ISIS 525474, ISIS 525612, and ISIS 525708. Forty eight hours after the last dose, rats were euthanized and organs and plasma were harvested for further analysis.

### Liver Function

[0502] To evaluate the effect of ISIS oligonucleotides on hepatic function, plasma levels of transaminases were measured on day 53 using an automated clinical chemistry analyzer (Hitachi Olympus AU400e, Melville, NY). Plasma levels of ALT and AST were measured and the results are presented in the Table below expressed in IU/L. Plasma levels of Bilirubin were also measured using the same clinical chemistry analyzer and the results are also presented in the Table below. ISIS oligonucleotides that caused changes in the levels of any markers of liver function outside the expected range for antisense oligonucleotides were excluded in further studies.

TABLE 150
Liver function markers in Sprague-Dawley rats

| | ALT | AST | Bilirubin |
|---|---|---|---|
| | (IU/L) | (IU/L) | (mg/dL) |
| PBS | 53 | 83 | 0.21 |
| ISIS 483817 | 81 | 127 | 0.13 |
| ISIS 483910 | 283 | 428 | 3.38 |
| ISIS 484085 | 131 | 208 | 0.27 |
| ISIS 484137 | 63 | 98 | 0.16 |
| ISIS 484215 | 50 | 86 | 0.13 |
| ISIS 484231 | 75 | 106 | 0.17 |
| ISIS 501871 | 45 | 73 | 0.10 |
| ISIS 502098 | 57 | 156 | 0.12 |
| ISIS 502163 | 85 | 177 | 0.21 |
| ISIS 502164 | 67 | 94 | 0.15 |
| ISIS 502194 | 54 | 82 | 0.15 |
| ISIS 525443 | 50 | 82 | 0.13 |
| ISIS 525474 | 118 | 136 | 0.22 |
| ISIS 525612 | 313 | 314 | 0.18 |
| ISIS 525708 | 65 | 117 | 0.16 |

### Kidney Function

[0503] To evaluate the effect of ISIS oligonucleotides on kidney function, plasma levels of creatinine and total protein were measured on day 53 using an automated clinical chemistry analyzer (Hitachi Olympus AU400e, Melville, NY). Results are presented in the Table below, expressed in mg/dL. Urine levels of creatinine and total protein were also measured on day 53 using the same automated clinical chemistry analyzer. Results are presented in the Table below, expressed in mg/dL.

TABLE 151
Kidney function markers in the plasma
(mg/dL) in Sprague-Dawley rats

| | BUN | Creatinine |
|---|---|---|
| PBS | 20 | 0.44 |
| ISIS 483817 | 22 | 0.40 |
| ISIS 483910 | 24 | 0.42 |
| ISIS 484085 | 19 | 0.37 |
| ISIS 484137 | 22 | 0.43 |
| ISIS 484215 | 19 | 0.36 |
| ISIS 484231 | 21 | 0.39 |
| ISIS 501871 | 23 | 0.31 |
| ISIS 502098 | 25 | 0.42 |
| ISIS 502163 | 21 | 0.37 |
| ISIS 502164 | 23 | 0.43 |
| ISIS 502194 | 21 | 0.44 |
| ISIS 525443 | 24 | 0.51 |
| ISIS 525474 | 22 | 0.39 |
| ISIS 525612 | 18 | 0.38 |
| ISIS 525708 | 31 | 0.53 |

TABLE 152
Kidney function markers in the urine
(mg/dL) in Sprague-Dawley rats

| | Creatinine | Total protein |
|---|---|---|
| PBS | 227 | 193 |
| ISIS 483817 | 95 | 2129 |
| ISIS 483910 | 60 | 1030 |
| ISIS 484085 | 87 | 868 |
| ISIS 484137 | 84 | 517 |
| ISIS 484215 | 146 | 1115 |
| ISIS 484231 | 89 | 652 |
| ISIS 501871 | 52 | 3426 |
| ISIS 502098 | 64 | 550 |
| ISIS 502163 | 73 | 522 |
| ISIS 502164 | 100 | 554 |
| ISIS 502194 | 95 | 410 |
| ISIS 525443 | 73 | 595 |
| ISIS 525474 | 79 | 1547 |
| ISIS 525612 | 94 | 453 |
| ISIS 525708 | 41 | 2043 |

### Body and Organ Weights

[0504] Body weights of the rat were measured on day 49 and are presented in the Table below. Liver, heart, spleen and kidney weights were measured at the end of the study, and are also presented in the Table below. ISIS oligonucleotides that caused any changes in body or organ weights outside the expected range for antisense oligonucleotides were excluded from further studies. ‘n/a’ indicates that the particular endpoint was not measured in that group of mice.

TABLE 153
Body and organ weights of Sprague-Dawley rats (g)

| | Body weight | Heart | Kidney | Liver | Spleen |
|---|---|---|---|---|---|
| PBS | 485 | 1.6 | 3.5 | 14.5 | 0.9 |
| ISIS 483817 | 362 | 1.2 | 4.2 | 17.0 | 2.3 |
| ISIS 483910 | 358 | 1.0 | 3.2 | 19.0 | 3.0 |
| ISIS 484085 | 348 | 1.1 | 2.9 | 15.3 | 1.6 |
| ISIS 484137 | 353 | 1.1 | 3.0 | 14.2 | 1.6 |
| ISIS 484215 | 391 | 1.2 | 3.7 | 16.6 | 2.0 |
| ISIS 484231 | 386 | 1.1 | 3.2 | 16.6 | 2.5 |
| ISIS 501871 | 322 | 1.1 | 3.5 | 17.4 | 1.8 |
| ISIS 502098 | 315 | 1.2 | 2.9 | 15.8 | 2.3 |
| ISIS 502163 | 326 | 1.0 | 3.5 | 14.5 | 3.4 |
| ISIS 502164 | 381 | 1.2 | 2.8 | 15.4 | 2.2 |
| ISIS 502194 | 439 | 1.3 | 3.4 | 18.6 | 2.0 |
| ISIS 525443 | 469 | 1.5 | 3.7 | 22.1 | 1.7 |
| ISIS 525474 | 445 | 1.7 | 3.8 | 19.2 | 2.2 |
| ISIS 525612 | 427 | 1.5 | 3.1 | 13.1 | 1.4 |
| ISIS 525708 | 338 | 1.0 | 3.6 | 15.9 | 2.3 |

### Example 16: Effect of ISIS Antisense Oligonucleotides Targeting Human DGAT2 in Cynomolgus Monkeys

[0505] Cynomolgus monkeys were treated with ISIS antisense oligonucleotides selected from studies described above. Antisense oligonucleotide efficacy and tolerability were evaluated.

[0506] At the time this study was undertaken, the cynomolgus monkey genomic sequence was not available in the National Center for Biotechnology Information (NCBI) database; therefore, cross-reactivity with the cynomolgus monkey gene sequence could not be confirmed. Instead, the sequences of the ISIS antisense oligonucleotides used in the cynomolgus monkeys was compared to a rhesus monkey sequence for homology. It is expected that ISIS oligonucleotides with homology to the rhesus monkey sequence are fully cross-reactive with the cynomolgus monkey sequence as well. The human antisense oligonucleotides tested are cross-reactive with the rhesus genomic sequence (Ref Seq No. NW_001100387.1 truncated from nucleotides 1232000 to 1268000, designated herein as SEQ ID NO: 3). The greater the complementarity between the human oligonucleotide and the rhesus monkey sequence, the more likely the human oligonucleotide can cross-react with the rhesus monkey sequence. The start and stop sites of each oligonucleotide to SEQ ID NO: 3 is presented in the Table below. “Start site” indicates the 5′-most nucleotide to which the gapmer is targeted in the rhesus monkey gene sequence.

TABLE 154
Antisense oligonucleotides complementary to
SEQ ID NO: 3

| | | | | | Unmod- | Mod- |
|---|---|---|---|---|---|---|
| | | | | | ified | ified |
| | | | | | SEQ | SEQ |
| ISIS | Start | Stop | | | ID | ID |
| No | Site | Site | Sequence | Motif | NO | NO |
| 484085 | 14986 | 15005 | GTCTGGGAACAG | 5-10-5 | 1371 | N/A |
| | | | CAGCATCA | | | |
| 484129 | 18207 | 18226 | GCACTGACATGG | 5-10-5 | 1415 | N/A |
| | | | TAAGTCCT | | | |
| 484137 | 18355 | 18374 | TGCCATTTAATG | 5-10-5 | 1423 | 4680 |
| | | | AGCTTCAC | | | |
| 495576 | 7054 | 7073 | CACCATAATCTG | 5-10-5 | 1849 | N/A |
| | | | CACAGGTT | | | |
| 501861 | 19517 | 19536 | TCACAGAATTAT | 5-10-5 | 2959 | N/A |
| | | | CAGCAGTA | | | |
| 502194 | 27298 | 27317 | CCTCTTAGAAGT | 5-10-5 | 3292 | N/A |
| | | | AATGCTTC | | | |
| 525443 | 2716 | 2732 | TCCATGTCAGAG | 3-10-4 | 4198 | N/A |
| | | | AGGCT | | | |
| 525612 | 14990 | 15006 | GGTCTGGGAACA | 3-10-4 | 4373 | N/A |
| | | | GCAGC | | | |

### Treatment

[0507] Prior to the study, the monkeys were kept in quarantine for a 30-week period, during which the animals were observed daily for general health. The monkeys were 2-4 years old and weighed between 2 and 4 kg. Eight groups of 5 randomly assigned male cynomolgus monkeys each were injected subcutaneously with ISIS oligonucleotide or PBS using a stainless steel dosing needle and syringe of appropriate size into the intracapsular region and outer thigh of the monkeys. The monkeys were dosed 3 times a week for the first week (days 1, 3, and 5) as loading doses, and subsequently twice a week for weeks 2-13, with 20 mg/kg of ISIS oligonucleotide. A control group of 6 cynomolgus monkeys was injected with 0.9% sterile saline subcutaneously three times a week for the first week (days 1, 3, and 5), and subsequently once a week for weeks 2-13.

[0508] During the study period, the monkeys were observed for signs of mortality, clinical observations, and body weight, qualitative food consumption, ophthalmoscopic and electro cardiac examination, clinical and anatomic pathology. Scheduled euthanasia of the animals was conducted on day 93 for animals assigned to terminal necroscopy and on Day 182 for animals assigned to the recovery necroscopy. A full panel of tissues were taken, processed to slides and examined microscopically for histopathology. The protocols described in the Example were approved by the Institutional Animal Care and Use Committee (IACUC).

### Hepatic Target Reduction

### Target Gene RNA Analysis

[0509] On day 93, RNA was extracted from liver tissue for real-time PCR analysis of DGAT2 using primer probe set mkDGAT2 (forward sequence CCGCAAGGGCTTTGTGAA, designated herein as SEQ ID NO: 13, reverse sequence TTCTCTCCAAAGGAGTACATGGG, designated herein as SEQ ID NO: 14, probe sequence CCTGCGCCATGGAGCCGAC, designated herein as SEQ ID NO: 15). Results are presented as percent inhibition of DGAT2 mRNA, relative to PBS control, normalized to the house keeping gene CyclophilinA. Similar results were obtained on normalization with RIBOGREEN®. As shown in the Table below, treatment with ISIS antisense oligonucleotides resulted in significant reduction of DGAT2 mRNA in comparison to the sterile saline control. Specifically, treatment with ISIS 484137 and ISIS 501861 resulted in the significant reduction of DGAT2 mRNA expression.

[0510] Inhibition levels with select oligonucleotides were also measured with the human primer probe set RTS2977_MGB. As presented in the Table below, treatment with ISIS oligonucleotides significantly reduced DGAT2 levels. Specifically, treatment with ISIS 484137 and ISIS 501861 resulted in the significant reduction of DGAT2 mRNA expression.

TABLE 155
Percent Inhibition of DGAT2 mRNA in the cynomolgus monkey liver
relative to the saline control (mkDGAT2 primer probe set)

| ISIS No | RIBOGREEN | CyclophilinA |
|---|---|---|
| 484085 | 20 | 21 |
| 484129 | 54 | 52 |
| 484137 | 71 | 69 |
| 495576 | 70 | 66 |
| 501861 | 89 | 88 |
| 502194 | 26 | 29 |
| 525443 | 49 | 48 |
| 525612 | 35 | 43 |

TABLE 156
Percent Inhibition of DGAT2 mRNA in the cynomolgus monkey liver
relative to the saline control (RTS2977_MGB primer probe set)

| ISIS No | RIBOGREEN | CyclophilinA |
|---|---|---|
| 501861 | 82 | 79 |
| 484137 | 63 | 58 |
| 525443 | 22 | 17 |

### Secondary Lipid Gene RNA Analysis

[0511] Gene expression analysis of secondary lipid genes, DGAT1, ACC1, ACC2, FAS, and SCD12 was also performed. The results are presented in the Table below, expressed as % expression of each gene compared to the PBS control. As presented in the Table below, treatment with ISIS oligonucleotides significantly reduced lipogenic gene levels. Specifically, treatment with ISIS 484137 resulted in the significant reduction of mRNA expression.

TABLE 157
% lipid gene expression

| | DGAT1 | ACC1 | ACC2 | FAS | SCD-1 |
|---|---|---|---|---|---|
| sterile saline | 100 | 100 | 100 | 100 | 100 |
| ISIS 484129 | 85 | 95 | 95 | 122 | 64 |
| ISIS 495576 | 82 | 66 | 59 | 65 | 40 |
| ISIS 501861 | 140 | 69 | 67 | 51 | 22 |
| ISIS 484085 | 118 | 122 | 86 | 281 | 123 |
| ISIS 484137 | 81 | 99 | 77 | 115 | 51 |
| ISIS 502194 | 103 | 91 | 81 | 114 | 63 |
| ISIS 525443 | 118 | 87 | 75 | 57 | 25 |
| ISIS 525612 | 170 | 106 | 96 | 83 | 42 |

### Tolerability Studies

### Body Weight Measurements

[0512] To evaluate the effect of ISIS oligonucleotides on the overall health of the animals, body weights were measured at regularly and are presented in the Table below. The results indicate that effect of treatment with antisense oligonucleotides on body weights was within the expected range for antisense oligonucleotides. Specifically, treatment with ISIS 484137 was well tolerated in terms of the body weights of the monkeys.

TABLE 158
Body weights in the cynomolgus monkey

| | Day 1 | Day 15 | Day 29 | Day 36 | Day 50 | Day 64 | Day 78 | Day 85 |
|---|---|---|---|---|---|---|---|---|
| sterile saline | 2734 | 2795 | 2775 | 2719 | 2743 | 2739 | 2807 | 2779 |
| ISIS 484085 | 2759 | 2785 | 2822 | 2762 | 2815 | 2812 | 2910 | 2911 |
| ISIS 484129 | 2780 | 2889 | 2906 | 2852 | 2918 | 2937 | 3043 | 3029 |
| ISIS 484137 | 2756 | 2793 | 2847 | 2763 | 2850 | 2823 | 2906 | 2900 |
| ISIS 495576 | 2748 | 2865 | 2905 | 2823 | 2869 | 2908 | 2996 | 2979 |
| ISIS 501861 | 2702 | 2775 | 2797 | 2750 | 2775 | 2828 | 2893 | 2860 |
| ISIS 502194 | 2817 | 2886 | 2902 | 2840 | 2926 | 2929 | 3038 | 3045 |
| ISIS 525443 | 2790 | 2835 | 2814 | 2767 | 2790 | 2772 | 2843 | 2859 |
| ISIS 525612 | 2921 | 2962 | 2995 | 2937 | 3006 | 3020 | 3093 | 3166 |

### Liver Function

[0513] To evaluate the effect of ISIS oligonucleotides on hepatic function, blood samples were collected from all the study groups. The blood samples were collected via femoral venipuncture on day 93, 48 hrs post-dosing. The monkeys were fasted overnight prior to blood collection. Blood was collected in tubes without any anticoagulant, and kept at room temperature for a minimum of 30 min for serum separation. The tubes were then centrifuged to obtain serum. Levels of various liver function markers were measured using a Toshiba 200FR NEO chemistry analyzer (Toshiba Co., Japan). Serum levels of ALT and AST were measured and the results are presented in the Table below, expressed in IU/L. Bilirubin, a liver function marker, was similarly measured and is presented in the Table below, expressed in mg/dL. The results indicate that antisense oligonucleotides had no effect on liver function outside the expected range for antisense oligonucleotides. Specifically, treatment with ISIS 484137 was well tolerated in terms of the liver function in monkeys.

TABLE 159
Liver function markers in cynomolgus monkey serum

| | ALT | AST | Bilirubin |
|---|---|---|---|
| | (IU/L) | (IU/L) | (mg/dL) |
| sterile saline | 40 | 42 | 0.20 |
| ISIS 484085 | 57 | 52 | 0.15 |
| ISIS 484129 | 43 | 43 | 0.16 |
| ISIS 484137 | 52 | 57 | 0.16 |
| ISIS 495576 | 56 | 45 | 0.15 |
| ISIS 501861 | 70 | 67 | 0.16 |
| ISIS 502194 | 88 | 54 | 0.16 |
| ISIS 525443 | 56 | 45 | 0.23 |
| ISIS 525612 | 38 | 37 | 0.23 |

### Kidney Function

[0514] To evaluate the effect of ISIS oligonucleotides on kidney function, blood samples were collected from all the study groups. The blood samples were collected via femoral venipuncture on day 93, 48 hrs post-dosing. The monkeys were fasted overnight prior to blood collection. Blood was collected in tubes without any anticoagulant, and kept at room temperature for a minimum of 30 min for serum separation. The tubes were then centrifuged to obtain serum. Levels of BUN and creatinine were measured using a Toshiba 200FR NEO chemistry analyzer (Toshiba Co., Japan). Results are presented in the Table below, expressed in mg/dL.

[0515] The plasma chemistry data indicate that most of the ISIS oligonucleotides did not have any effect on the kidney function outside the expected range for antisense oligonucleotides. Specifically, treatment with ISIS 484137 was well tolerated in terms of the kidney function of the monkeys.

TABLE 160
BUN and creatinine levels (mg/dL) in cynomolgus monkeys

| | BUN | Creatinine |
|---|---|---|
| sterile saline | 25 | 0.87 |
| ISIS 484085 | 26 | 0.94 |
| ISIS 484129 | 21 | 0.81 |
| ISIS 484137 | 24 | 0.94 |
| ISIS 495576 | 22 | 0.92 |
| ISIS 501861 | 25 | 0.90 |
| ISIS 502194 | 27 | 0.86 |
| ISIS 525443 | 26 | 1.08 |
| ISIS 525612 | 23 | 0.98 |

### Example 17: Effect of ISIS 484137 Targeting Human DGAT2 in Cynomolgus Monkeys

[0516] Cynomolgus monkeys were treated with ISIS 484137 to evaluate the safety of this antisense oligonucleotide over a 13-week dosing period followed by a 13 week recovery period. The protocols described in the Example were approved by the Testing Facility's Institutional Animal Care and Use Committee (IACUC).

### Treatment

[0517] The monkeys were 2-4 years old and weighed between 2.3 and 3.7 kg. Five groups of 6-10 randomly assigned cynomolgus monkeys each were injected subcutaneously with ISIS oligonucleotide or 0.9% sterile saline using a stainless steel dosing needle and syringe of appropriate size into one of four delineated sites on the backs of the monkeys. The monkeys were dosed on Days 1, 3, 5, and 7, and then once weekly thereafter for a total of 13 weeks at dose levels of 4 mg/kg, 8 mg/kg, 12 mg/kg, or 40 mg/kg of ISIS 484137. A control group of 10 cynomolgus monkeys was injected with 0.9% sterile saline subcutaneously using the same regimen. Toxicokinetics were assessed in a sixth group of 14 animals (7 of each sex) at the 8 mg/kg dose level. Recovery was assessed in the controls and at the 12 mg/kg and 40 mg/kg dose levels of ISIS 484137 (2 per sex).

[0518] During the study period, the monkeys were observed for signs of mortality, clinical observations, and body weight, qualitative food consumption, ophthalmoscopic and electrocardiographic examination, clinical and anatomic pathology. Scheduled euthanasia of the animals was conducted on day 93 for animals assigned to terminal necroscopy and on Day 182 for animals assigned to the recovery necroscopy. A full panel of tissues were taken, processed to slides and examined microscopically for histopathology.

### Body and Organ Weight Measurements

[0519] To evaluate the effect of ISIS 484137 on the overall health of the animals, body weights were measured at regularly and are presented in the Table below. Organ weights were measured after euthanisia. ‘n.d.’ indicates that there is no data for that timepoint. The results indicate that effect of treatment with ISIS 484137 on body and organ weights was within the expected range for antisense oligonucleotides. Specifically, treatment with ISIS 484137 was well tolerated in terms of the body and organ weights of the monkeys.

TABLE 161
Body weights (g) of cynomolgus monkeys

| | Dose | | Day |
|---|---|---|---|
| | (mg/kg) | Day 93 | 182 |
| sterile saline | — | 3035 | 3075 |
| ISIS 484137 | 4 | 2848 | n.d. |
| | 8 | 2850 | n.d. |
| | 12 | 3125 | 3325 |
| | 40 | 3027 | 2875 |

TABLE 162
Organ weights (g) of cynomolgus monkeys on day 93

| | Dose | | Adrenal | | | | | |
|---|---|---|---|---|---|---|---|---|
| | (mg/kg) | Brain | gland | Heart | Kidney | Liver | Spleen | Thyroid |
| sterile saline | — | 67 | 0.46 | 10.8 | 12.6 | 60.0 | 4.1 | 0.4 |
| ISIS 484137 | 4 | 67 | 0.52 | 9.7 | 13.2 | 60.8 | 3.9 | 0.3 |
| | 8 | 67 | 0.51 | 10.9 | 14.2 | 73.7 | 3.6 | 0.4 |
| | 12 | 69 | 0.56 | 10.1 | 14.0 | 65.1 | 3.2 | 0.3 |
| | 40 | 69 | 0.59 | 10.2 | 15.8 | 79.2 | 6.2 | 0.4 |

### Plasma Homeostasis

[0520] To evaluate the potential for ISIS 484137 to produce complement activation, plasma samples were obtained once prior to treatment initiation on Day-7, then following the first dose on Day 1 at 4, 8 and 24 hours, and finally following the last dose on Day 91 predose and at 4 hours for determination of complement split product Bb using ELISA. Serum samples were also obtained for measurement of Complement C₅ on Day-7, on Day 1 (at 24 hours post dose), on Day 91 (predose and at 24 hours post dose) and for recovery animals on Days 121 and 182 using an automated clinical chemistry analyzer. Additionally, blood for coagulation analyses was taken on Day 1 (4 hours post dose) and on Day 91 (predose, 1, 4, 8, and 24 hours post dose) and evaluated using an automated coagulation analyzer.

[0521] At the 40 mg/kg dose level, indications of alternative pathway activation were observed as acute, transient increases in Complement Bb (up to 7-fold over baseline) at 4 hours post dose on Days 1 and 91. Complement Bb then returned to baseline levels at 24 hours on Day 1 or to near baseline levels on Day 91. There were no significant changes in Complement C5 observed during the study. Mild, transient prolongations of APTT (up to 29%), relative to controls were observed at 4 to 8 hours post dose and then diminished by 24 or 48 hours post dose. The acute transient increases in Complement Bb and APTT observed following treatment with ISIS 484137 were typical of those commonly seen oligonucleotide-treated monkeys.

### Liver Function

[0522] To evaluate the effect of ISIS 484137 on hepatic function, blood samples were collected from all the study groups on Days 44, 93, 121, and 182 for determination of liver transaminases and liver functions. Serum levels of ALT and AST were measured and the results are presented in the Table below, expressed in IU/L. Bilirubin, a liver function marker, was similarly measured and the results are presented in the Table below, expressed in mg/dL. ISIS 484137 had no adverse effect on liver function outside the expected range for antisense oligonucleotides. ‘n.d.’ indicates that there is no data for that timepoint. The results indicate that treatment with ISIS 484137 was well tolerated in terms of the liver function in monkeys.

TABLE 163
ALT levels (IU/L) in cynomolgus monkey serum

| | Dose | | | |
|---|---|---|---|---|
| | (mg/kg) | Day 44 | Day 93 | Day 182 |
| sterile saline | — | 43 | 36 | 36 |
| ISIS 484137 | 4 | 31 | 38 | n.d. |
| | 8 | 33 | 31 | n.d. |
| | 12 | 32 | 40 | 27 |
| | 40 | 41 | 62 | 42 |

TABLE 164
AST levels (IU/L) in cynomolgus monkey serum

| | Dose | | | |
|---|---|---|---|---|
| | (mg/kg) | Day 44 | Day 93 | Day 121 |
| sterile saline | — | 54 | 65 | 41 |
| ISIS 484137 | 4 | 33 | 53 | n.d. |
| | 8 | 50 | 53 | n.d. |
| | 12 | 29 | 71 | 31 |
| | 40 | 49 | 90 | 44 |

TABLE 165
Total bilirubin levels (mg/dL) in cynomolgus monkey serum

| | Dose | | | | |
|---|---|---|---|---|---|
| | (mg/kg) | Day 44 | Day 93 | Day 121 | Day 182 |
| sterile saline | — | 0.20 | 0.25 | 0.23 | 0.20 |
| ISIS 484137 | 4 | 0.17 | 0.20 | n.d. | n.d. |
| | 8 | 0.20 | 0.20 | n.d. | n.d. |
| | 12 | 0.20 | 0.35 | 0.20 | 0.20 |
| | 40 | 0.20 | 0.20 | 0.18 | 0.23 |

### Kidney Function

[0523] To evaluate the effect of ISIS 484137 on kidney function, blood samples were collected from all the study groups on days 44, 93, 121, and 182. Results are presented in the Table below, expressed in mg/dL.

[0524] The serum chemistry data indicate that ISIS 484137 did not have any effect on the kidney function outside the expected range for antisense oligonucleotides. Similar results were found with urine samples of the monkeys. Treatment with ISIS 484137 was therefore well tolerated in terms of the kidney function of the monkeys.

TABLE 166
Albumin levels (g/dL) in cynomolgus monkey serum

| | Dose | | |
|---|---|---|---|
| | (mg/kg) | Day 44 | Day 93 |
| sterile saline | — | 4.2 | 4.1 |
| ISIS 484137 | 4 | 4.2 | 4.1 |
| | 8 | 4.3 | 3.9 |
| | 12 | 3.8 | 4.0 |
| | 40 | 3.8 | 3.8 |

TABLE 167
BUN levels (mg/dL) in cynomolgus monkey serum

| | Dose | | | |
|---|---|---|---|---|
| | mg/kg | Day 44 | Day 93 | Day 121 |
| sterile saline | — | 23.7 | 22.5 | 23.0 |
| ISIS 484137 | 4 | 18.0 | 17.7 | n.d. |
| | 8 | 20.0 | 21.0 | n.d. |
| | 12 | 22.0 | 22.0 | 21.0 |
| | 40 | 21.3 | 20.0 | 24.0 |

TABLE 168
Creatinine levels (mg/dL) in cynomolgus monkey serum

| | Dose | | | | |
|---|---|---|---|---|---|
| | (mg/kg) | Day 44 | Day 93 | Day 121 | Day 182 |
| sterile saline | — | 128 | 81 | 120 | 93 |
| ISIS 484137 | 4 | 129 | 138 | n.d. | n.d. |
| | 8 | 69 | 79 | n.d. | n.d. |
| | 12 | 183 | 153 | 79 | 84 |
| | 40 | 129 | 85 | 74 | 72 |

### Plasma Toxicokinetics

[0525] Following subcutaneous injection in monkeys, ISIS 484137 was quickly absorbed into the systemic circulation with a median Tₘₐₓ (time to reach plasma Cₘₐₓ) ranging from 1 to 4 hours. Peak exposure (Cₘₐₓ) and total exposure (AUC_{0-48 hr}) were dose-dependent on Day 1, Day 7, and Day 91. Similar AUC (area under the curve) values were observed between Day 1 (after a single dose) and Day 91 (after 16 doses). These results indicate a lack of plasma accumulation of ISIS 484137 following multiple doses. Mean clearance values (CL/F_{0-48 hr}) following subcutaneous administration at all dose levels following single or multiple administrations ranged from 31.3 to 75.8 mL/hr/kg and appeared to decrease with increasing dose. The post-distribution plasma elimination half-life (t_{1/2λz}) ranged from 9.42 days to 20.2 days following the 13 weeks of treatment. A review of ISIS 484137 plasma toxicokinetic parameters revealed no gender difference. The Table below presents the results. ‘n.d.’ means ‘not determined’.

TABLE 169
Plasma toxicokinetic summary in monkeys for ISIS 484137

| | | Number | | | AUC_{0-48 hr} | |
|---|---|---|---|---|---|---|
| Dose | | of | Cₘₐₓ | | (hr* | t_{1/2λz} |
| (mg/kg) | Day | animals | (μg/mL) | Tₘₐₓ (hr) | μg/mL) | (days) |
| 4 | 1 | 6 | 15 | 1.5 | 59 | n.d. |
| | 91 | 6 | 7 | 3.0 | 53 | n.d. |
| 8 | 1 | 6 | 30 | 1.5 | 138 | n.d. |
| | 7 | 12 | 28 | 2.0 | 137 | 9.42 |
| | 91 | 6 | 19 | 2.0 | 127 | n.d. |
| 12 | 1 | 10 | 43 | 1.0 | 263 | n.d. |
| | 91 | 10 | 24 | 4.0 | 261 | 15.1 |
| 40 | 1 | 10 | 113 | 1.0 | 1030 | n.d. |
| | 91 | 10 | 92 | 1.0 | 1300 | 20.2 |

### Tissue Toxicokinetics

[0526] There was a dose-dependent increase in kidney cortex and liver concentrations over the 10-fold increase in dose of ISIS 484137. Based on the mean tissue ISIS 484137 concentrations at the end of treatment and after recovery, the estimated tissue half-lives were 16.4 to 21.3 days and 17.8 to 22.8 days in kidney and liver, respectively, similar to the tissue half-lives determined following 8 mg/kg ISIS 484137. These findings are also consistent with the estimated terminal elimination half-life values in plasma. The Table below presents the results. ‘n.d.’ means ‘not determined’.

[0527] The tissue half-life (approximately 2-3 weeks) observed supports an infrequent clinical dosing regimen.

TABLE 170
Tissue toxicokinetic summary in monkeys for ISIS 484137

| | Intact ISIS 484137 (μg/g) | | | | | |
|---|---|---|---|---|---|---|
| | Day 3 (2 days | | Day 93 (2 days | | Day 182 (91 days | |
| Dose | after 1^{st} dose) | | after last dose) | | after last dose) | |
| (mg/kg) | Kidney | Liver | Kidney | Liver | Kidney | Liver |
| 4 | n.d. | n.d. | 610 | 221 | n.d. | n.d. |
| 8 | 594 | 84 | 889 | 406 | n.d. | n.d. |
| 12 | n.d. | n.d. | 1320 | 586 | 30 | 18 |
| 40 | n.d. | n.d. | 4220 | 993 | 233 | 66 |

### Pro-Inflammatory Effects

[0528] None of the inflammatory marker levels were changed beyond the expected range for antisense oligonucleotides. Therefore, treatment with ISIS 484137 did not cause any adverse inflammation and was well tolerated in the monkeys.

[0529] In summary, 13 weeks treatment with ISIS 484137 was clinically well tolerated at doses up to 40 mg/kg/week. There was no mortality during the study and there were no treatment-related effects in clinical findings, body weights, food consumption/appetence, ophthalmoscopic and electrocardiographic examinations, hematology, urinalysis, or complement C3 levels during the study. Overall, the results of the study indicate that ISIS 484137 is the most potent and well tolerated compound of those tested for inhibiting DGAT2 and is an important candidate for the treatment of metabolic diseases, such as NAFLD and NASH.

### Example 18: Double-Blind, Placebo-Controlled, Dose-Escalation Phase I Study

[0530] A double-blind, placebo-controlled, dose-escalation Phase I study to assess the safety, tolerability, pharmacokinetics and pharmacodynamics of single and multiple doses of ISIS 484137 administered subcutaneously to healthy overweight volunteers is conducted in a Study Center.

### Treatment Protocol

[0531] Approximately 48 subjects are planned to be enrolled in the study: 16 subjects in the single-dose cohorts and 32 subjects in the multiple-dose cohorts. Subjects are healthy males or females aged 18-65, inclusive, who have given written consent and are able to comply with all the study requirements. BMI of the volunteers is 29.0-38.0 kg/m² inclusive. Any volunteers with clinically significant abnormalities in medical history are excluded from the study. ISIS 484137 solution or placebo (0.9% sterile saline) is prepared by an unblinded pharmacist or qualified delegate shortly before use, using aseptic technique. Study staff, who are blinded to the identity of the drug, administer the drug to the subjects.

[0532] There are 4 single-dose cohorts (Cohort A-D) with 4 subjects per cohort randomized 3:1 of ISIS 484137: placebo. The length of each subject's participation is approximately 8 weeks, which includes a 4-week screening period, a single dose, and a 4-week post-treatment evaluation period. Subjects receive a single dose of ISIS 484137 by subcutaneous administration. The dose of the antisense oligonucleotide to each cohort is presented in the Table below.

TABLE 171
Single-dose cohort dosing regimen of ISIS 484137

| | Total |
|---|---|
| | dose |
| Cohort | (mg) |
| A | 50 |
| B | 100 |
| C | 200 |
| D | 400 |

[0533] There are 4 multiple-dose cohorts (Cohort AA-DD) with 8 subjects per cohort randomized 3:1 of ISIS 484137: placebo. The length of each subject's participation is approximately 23 weeks, which includes a 4-week screening period, a 6-week treatment period, and a 13-week post-treatment evaluation period. Subjects receive 3 doses of ISIS 484137 by subcutaneous administration during the first week (Days 1, 3, and 5) and subsequently receive one subcutaneous dose once a week for the next 5 weeks (Days 8, 15, 22, 29, and 36) for a total of 8 doses. Subjects have follow-up visits at the Study Center on Days 37, 43, 50, 64, 78, 92, 106, and 127.

TABLE 172
Multiple-dose cohort dosing regimen of ISIS 484137

| | Dose per | Total |
|---|---|---|
| | administration | dose |
| Cohort | (mg) | mg |
| AA | 100 | 800 |
| BB | 200 | 1600 |
| CC | 300 | 2400 |
| DD | 400 | 3200 |

[0534] Blood and urine samples are collected regularly throughout the study for safety, pharmacokinetic, and pharmacodynamics analysis. The safety and tolerability of ISIS 484137 is assessed by determining the incidence, severity, and dose-relationship of adverse events, vital signs, physical examination, ECG findings, and clinical laboratory parameters. Safety results in subjects dosed with ISIS 484137 are compared with those in subjects dosed with placebo.

What is claimed:

1. A compound comprising a modified oligonucleotide 8 to 80 linked nucleosides in length having a nucleobase comprising at least 8 contiguous nucleobases of any of the nucleobase sequences of SEQ ID NO:16-1422, 1426-4679.

2. The compound of claim 1, wherein the modified oligonucleotide has a nucleobase sequence comprising the nucleobase sequence of any one of SEQ ID NO:16-1422, 1426-4679.

3. The compound of claim 1, wherein the modified oligonucleotide has a nucleobase sequence consisting of any one of SEQ ID NO: 16-1422, 1426-4679.

4. The compound of claim 1, wherein the modified oligonucleotide has a nucleobase sequence comprising any one of SEQ ID NO: 1371, 1415, 1849, 2959, 3292, 4198, and 4373, wherein the modified oligonucleotide comprises
a gap segment consisting of linked deoxynucleosides;
a 5′ wing segment consisting of linked nucleosides; and
a 3′ wing segment consisting of linked nucleosides;
wherein the gap segment is positioned between the 5′ wing segment and the 3′ wing segment and wherein each nucleoside of each wing segment comprises a modified sugar.

5. The compound of claim 1, wherein the oligonucleotide is at least 80% complementary to SEQ ID Nos: 1 or 2.

6. The compound of claim 1, wherein the modified oligonucleotide comprises at least one modified internucleoside linkage, at least one modified sugar, or at least one modified nucleobase.

7. The compound of claim 6, wherein the modified internucleoside linkage is a phosphorothioate internucleoside linkage.

8. The compound of claim 6, wherein the modified sugar is a bicyclic sugar.

9. The compound of claim 8, wherein the bicyclic sugar is selected from the group consisting of: 4′—(CH₂)—O-2′ (LNA); 4′—(CH₂)₂—O-2′ (ENA); and 4′-CH(CH₃)—O-2′ (cEt).

10. The compound of claim 6, wherein the modified sugar is 2′-O-methoxyethyl.

11. The compound of claim 6, wherein the modified nucleobase is a 5-methylcytosine.

12. The compound of claim 1, wherein the compound is double-stranded.

13. The compound of claim 1, wherein the compound comprises ribonucleotides.

14. The compound of claim 1, wherein the modified oligonucleotide consists of 10 to 30 linked nucleosides.

15. The compound of claim 1, further comprising a conjugated GalNAc moiety.

16. A composition comprising the compound claim 1, or salt thereof, and a pharmaceutically acceptable carrier.

17. A method of treating, preventing, or ameliorating a disease associated with DGAT2 in an individual comprising administering to the individual the compound of claim 1, or salt thereof, thereby treating, preventing, or ameliorating the disease.

18. The method of claim 17, wherein the disease is NAFLD, NASH, lipodystrophy, or partial lipodystrophy.

19. A method of inhibiting expression of DGAT2 in a cell comprising contacting the cell with the compound of claim 1, thereby inhibiting expression of DGAT2 in the cell.

20. A method of reducing or inhibiting triglyceride synthesis, lipid synthesis and insulin resistance in the liver or white adipose tissue of an individual having, or at risk of having, a disease associated with DGAT2 comprising administering the compound of claim 1 to the individual, thereby reducing or inhibiting triglyceride synthesis, lipid synthesis and insulin resistance in the liver or white adipose tissue of the individual.

The application's sequence listing, which the Patent Office published only in electronic form, follows.

SEQUENCE LISTING (4683 sequences)

SEQ ID NO: 1 - RNA, 2485 nt, Homo sapiens
  source 1..2485: mol_type = mRNA
tgccccgttgtgaggtgataaagtgttgcgctccgggacgccagcgccgcggctgccgcctctgctggggtctaggctgtttctctcgcgccaccactggccgccggccgcagctccaggtgtcctagccgcccagcctcgacgccgtcccgggacccctgtgctctgcgcgaagccctggccccgggggccggggcatgggccaggggcgcggggtgaagcggcttcccgcggggccgtgactgggcgggcttcagccatgaagaccctcatagccgcctactccggggtcctgcgcggcgagcgtcaggccgaggctgaccggagccagcgctctcacggaggacctgcgctgtcgcgcgaggggtctgggagatggggcactggatccagcatcctctccgccctccaggacctcttctctgtcacctggctcaataggtccaaggtggaaaagcagctacaggtcatctcagtgctccagtgggtcctgtccttccttgtactgggagtggcctgcagtgccatcctcatgtacatattctgcactgattgctggctcatcgctgtgctctacttcacttggctggtgtttgactggaacacacccaagaaaggtggcaggaggtcacagtgggtccgaaactgggctgtgtggcgctactttcgagactactttcccatccagctggtgaagacacacaacctgctgaccaccaggaactatatctttggataccacccccatggtatcatgggcctgggtgccttctgcaacttcagcacagaggccacagaagtgagcaagaagttcccaggcatacggccttacctggctacactggcaggcaacttccgaatgcctgtgttgagggagtacctgatgtctggaggtatctgccctgtcagccgggacaccatagactatttgctttcaaagaatgggagtggcaatgctatcatcatcgtggtcgggggtgcggctgagtctctgagctccatgcctggcaagaatgcagtcaccctgcggaaccgcaagggctttgtgaaactggccctgcgtcatggagctgacctggttcccatctactcctttggagagaatgaagtgtacaagcaggtgatcttcgaggagggctcctggggccgatgggtccagaagaagttccagaaatacattggtttcgccccatgcatcttccatggtcgaggcctcttctcctccgacacctgggggctggtgccctactccaagcccatcaccactgttgtgggagagcccatcaccatccccaagctggagcacccaacccagcaagacatcgacctgtaccacaccatgtacatggaggccctggtgaagctcttcgacaagcacaagaccaagttcggcctcccggagactgaggtcctggaggtgaactgagccagccttcggggccaattccctggaggaaccagctgcaaatcacttttttgctctgtaaatttggaagtgtcatgggtgtctgtgggttatttaaaagaaattataacaattttgctaaaccattacaatgttaggtcttttttaagaaggaaaaagtcagtatttcaagttctttcacttccagcttgccctgttctaggtggtggctaaatctgggcctaatctgggtggctcagctaacctctcttcttcccttcctgaagtgacaaaggaaactcagtcttcttggggaagaaggattgccattagtgacttggaccagttagatgattcactttttgcccctagggatgagaggcgaaagccacttctcatacaagcccctttattgccactaccccacgctcgtctagtcctgaaactgcaggaccagtttctctgccaaggggaggagttggagagcacagttgccccgttgtgtgagggcagtagtaggcatctggaatgctccagtttgatctcccttctgccacccctacctcacccctagtcactcatatcggagcctggactggcctccaggatgaggatgggggtggcaatgacaccctgcaggggaaaggactgccccccatgcaccattgcagggaggatgccgccaccatgagctaggtggagtaactggtttttcttgggtggctgatgacatggatgcagcacagactcagccttggcctggagcacatgcttactggtggcctcagtttaccttccccagatcctagattctggatgtgaggaagagatccctcttcagaaggggcctggccttctgagcagcagattagttccaaagcaggtggcccccgaacccaagcctcacttttctgtgccttcctgagggggttgggccggggaggaaacccaaccctctcctgtgtgttctgttatctcttgatgagatcattgcaccatgtcagacttttgtatatgccttgaaaataaatgaaagtgagaatcctcaaaaaaaaaaaaaaaaaaaaaaaaaaaaaaaaa

SEQ ID NO: 2 - DNA, 42823 bp, Homo sapiens
  source 1..42823: mol_type = genomic DNA
gcagcagaagtgttaaagtttaagtgaaagttttaaaaaggggtatgtgtggttgtaaagaaggcttcttggaggaagatgcatcaagacaggacagatggacagggtgtgaaaaagggggagcttggggaagggcttgagctcaagagcacagtgtgggcagggacccagaggtggaaaagcacgttcaggggcagggcaagtgacctgatgggcctagggagctggacccacattagagcatggcggtgggagaggagtggaggcggctggagagagtggcaggagcaggatgatgtgaggccttgaatgccaagttaaggagctggggcctcatcctaagaactatggggagccacgagaaacaatggttgggttctgtgttctgaagctcattctgggaatctggagacaggggaccagtgaagaggatagtacagctgtctatgcaaggtggcatggcccaaggcagaagagagaaggagagaactgtttcctggttgttgggcatagaggtatcagtgtgaatgtttttgtatgtgtccatgagcacaagtaatctttctcagagagtcagcctaaaaaaaaaaaaaaacccaaccctattcagtttcatgacccagcatacccagcagcctgggggaggccaaagttaccaaagaaagaggctgagagacattcagttaaagcctgactttatagttcttcctcatcaacaccatcctgcaaattcacattcatctacaggctttcagggtgttttaatcccagttatctcacccaaaatatttgcttttccgcctttctttgtgtttcctgtatgcctcatgtcagcatccttgttcaggtcacttacttaaaaaaaaaaaaaaatccataaggccgggctgaggtggagcctggagtgaccaggaaaccactctagaatgaactcctacctgaggcagctcctcctccctagcagagcccacactggcctgctgatcacctccctgctcaggactctgctgataccatagacctagtcctaggccagtttgggaatctagagaggccattgaaaagaaaactgatatatggataccacccctcctcggtgactcaatcgtagctcctgacaactcagggttttgtttttttgtttgtttgttttttctcttgagggttacagagcatcatttatagaatgcagtttatacaactgacctcagaatatggccaggattttgcagctattatagagcatggtctctggagccagaccatctcagcttaaatcctggctctgccacttcctaagctgtgtgaccttgggcaattttttttaacctctttgtgtctcaatttctccatctgaaaaatggactcatatagtatctactccaaagggttgttgtgaggcttaactaaatccacccatgtaaggaacctagaatagtaactggcagacagtaaatactcactgaagtttaacacctgttatattgcctgttatagttcatgaaaactgttgcttctccttttggaaaaatcaggatggcactagcccacctccagtctcccaacgcttctccagctgaacagcatttcctagagattacagattctgtaatctgcaggttctctgagatgcagttggaacaatttaatacagcagagcagtcccatgctccactgtagtctcactgcaaaacagttcagcagcggttctcaaaatgtgggcttcaaactagcagtatcagcatgtcctgggaacttgttagaaatgcacattctcagcctcactccagaacctactgaatcagaaactctgggggtggaacccagaaagctatattttaaccagccctctgctaatgtttgaaaactgccacagcatattatagcacagtggtttatttaggtagatatggcgcagttcattgcccactccttctccacaaagtgttcctgattcccccagaaccctcttttactaacagctctaacttcctccctgtattactgttgtccatgctcaaaagtgctcaatcctccctggattacaggttacctgagagcagtgttgggtcttacacatctctgcactgggcagcccaggggctgccacagggacctttgcttaggaaagacatgctgagtcaagcgtgcaacatttccagtttcctctgactaaggctactattactgagcctctgctccttccaggacccttgctcatactgcattttcctttgtgaattgtggtcatctcctatgctaagatgcctggttctttgtcatttctagtatcctccagttccactgccttctcaggcattttactcttctccctccctttatgtttgttcaaagccctttggagaaggtgtcagagctccaggcaaacctgtcaccctaatccttattttcaatcataatacttctactggtaacaatttgtcaagtactatatgccaggccctgtactgggcattttacattcattcattcattcacttagagacagggtgtctctctgctgcccaggctgcagcgcagtgacacgatcatagctcactgcggcctctaactcctggactcaagcaatcctcccctccccctaccttggcctcctacgtagctgggactacagacacatgccaccatgcctaggtaattttttttttttgggtagagatggggtctgtctgtgttgcccaggctggtcttcaactcctgggctcaaatgatcctcatgcctcagcatcccaaagtactgagattacaggcatgagccattgtgcccatatggcactttacatttattattttagtctttacaacaaccctaggaggaagatacctattcccatttggatggagcacagggaaactgaggctcaaacacagtaagcaacattaacatgtggcaaggtgggggcttattcagtctggggccaagtcagggtctgggtggatggaccaggagaagggccttgtctaggcatatgtattcatataaaaatgatccaccaacaaacctgtccagtgcccttgctcaggaagatgggtctgaccaggtgccagcccaccagggtgcctttccacagtgtgcagggggcatccacctgaatgcccgtcttcagtgcatcccctggccctgcacttgctattctgtgcagcaggagtttcaaactgtgttccacagagccctggagatagggtgtgtgggctgggcaagtgagagacaaaccctgaggaactgtgggaccaccccagcagcctgtcatccctgtcacttcttgggctctcaaggttgtatttgaagaaatgatttcagctgggcgcggtggctcacgcctgtaatcccagcgctttgggaggttgagatgggcggatcacgaggtcaggagcttgagaccatcttggctaacatggcaaaacctcgtctctaaaaatacaaaaaaaaaattagctggatgtggtggcgggcgcctgtagtcccagctacttgggaggctgaggcaggagaatggcgtgaacccgggaggtggagcttgtagtgagccgagattgtgccactgcactccagcctgggcgacagaacgagactccgtctcaaaaaaaaaaaaaagaaaaaagaaaaaaagaaatggtttcactgcttttaaaaagctagaaactactgctgaataataattgtcattttaggtgtctgtttcttcccccagaatgcccctaaggagcaagaactgtacccacagcacccagcacaaggatggggggtctcaggaaaggtcggccagatagaagggcagatgagaaatgaatgtactgggagctctctgtgtaatatcccctcccccaccctcaccccaccccccaattcctgcagggaagaggccttgagagagttgagtaagaaataagcaggcagaatgatgcaaggggagctgtctgtacacattgcaacagaactttctaaaacaagcctggggctgctcccaagggtctcagtcctgccctattcctctactgtcatccagacctgtcacacaagatagggccaaaggccattaccaagctctgctaaggcctgaccttagagctgggaggtctgtgctcttgggttctggtttgaaacccggagccatcttcaatcacccccttccttcctttcagccctacatccatgccatcaaatcctagagactctaaagcttcagcatctctcaaaatcaccctcgcttctcttttgccttgccaccccttcagttcaggctctgtcgtcattatctctctccttcctctcatctgcctccctcccttccatccaatatcacccaggtccctgtgggttgtctgtgccccttcagcaaaggccacagcttccatgtggcagccctctccgctcagcccccattgcacctgcagtgtccttctcttagtccttcaggccagatcccctgtgaggtgactagtcctgggctactgcaccatcccttgagttttctctatagcctgcttacatctttgcaaacagtctttgtattaaactgtcctcaaattacccagtttgggtgggctgtttcccatagggacactgactaatataaggtagaggtagttaggaagggtgccatggagatgacagttaaagatgttcttgcctggacaatgatctttctaaagcataaaactcctgctaaaaacctctatggctccccattgccctgagaataaagtccagactctgtagcctgccacccaagactatataccatcaggcccctgaccacaaagcagcagcagcatgtggggaagccaccaggaagagggagagtagggggcttggacgtgggaggcaaagacttccaagaggagtgcagccatgccacacagctgctctggctggcaaattcctgtgagtaaggaggcgggtgagtttccaggctagagggccatgccaggctgcctctgcttgccagaaccctgcccgcccactctccaagtgagttgagcactgaaaggagtttaaccccaatgggccctagccttgtggcatgagaactggttacatcccaaccccatctggtaagctattggattccctgagctttcattttgccaactgcaaaatgggactaacctcccagggctgtggaggcgatggatgggaatttgctttcgtccagtagttctgctgttacaggtgctccctctcccagccttgggaggcaggaaaagcgtacaggtttgaggctctggaagacttggtgtgaatctcagctttactacttactccttgtgtgatccaggacaagtcactttacttccctgcaccccatgtgcaaagcggtgggggtgatcaccccttgtgtggtggctgtgaggactgggcaagctcacacaagccagggcctagcacagagcagggagcttgatacacgtttgtttctgtctttctacctgtgcctctcttagggcaagtgtcctctctgccttataggctggccacttaccctcctcatgtgtgcaatggaggagctaagactgctatcactgaagcatatctcagaggtgcatgcgtcaaacctctcacaagctacaaagctgcacgtgtaatccccaatggctgtacaacactggtgattgaagtgggtggaggatgagccatccttgtggatgcctctctgctcacacccctcctttggtccatcccccaacaggatgaagtccaagcttcttggtgggaccacaaagcccaccctggtcaagcccttcttggaggcatgacttgaccggtctctgattttcccaatatacacatgggttgagagatgatgaaggaaaggtaaccaggtcctagaacacattctcaagctgttctgctcacacacctgcaggaaggtcagggctggtcattataggaggctaggaatgtcaagaagcatgggagggggccaggagaagtcagagtctggtgtaagtcccccttgcccaaactcacacaggggaaaacagtcccaggacacaggaagctgccatgaaacttcctttccaggctactctaagtttgggtctggttttccttccaaatccaatttggaccaagctgtttaagcagtacccatgggcatggcggctggaggccaaggggaaggagtgttctagaagttgggatgccaggggctgcttgctctgtgaggtggcacagaagtaagcaattgtgcctctcagcccttggactcacctctgcgtcctctcacagatgttcccacacaggaagggcccaagctggggaccagattttatggccctattccccaagcacccacctccaccccaacaacccagcttatcttccttttttttttttttttttgagtcttgctctctcgcccaggctaccaggctggagtgcagtggcacaatctcggctcactgcaagctccatctcctgggttcacgccattctcttgcctcagcctcccgagtagctgggactacaggcacctgccaacacgcctggctaatttttgtatttttagcagagaggaggtttcaccgtgttagccaggatggtctcgatctactgacctcgtgatccacccgcctcggcctcccgaagtgctgggattacaggcgtaagccaccgcgctgggccccagtttatctttctaacccaccaatccaatcaaggtgcatctctgctcacacccctcctttggtccatccccccacaggatgaagtccaagcttcctggcaggacccacgaggccgttcagatctgggccctgtcaacctctccagcctcatttcctacccctcttctgcctgtatctttctttcagccacaccagggtgctcacagggttcctacctccaggcctttgtccatgctgtaccctctgcctgacacctttcccctttccccctgcctcacagaatcagacttctcatcttaggtctgcagcaatatcacttcttcttgaccttcccaatttaccattccctctacttcctctatgactctactatactttttcagggggcaatccaccttggactaagcgtctatgccgagctaggcccacactgggacatagagtgatgaggttcctgcccttgggaaacgcctggctccgtggagaggcaggcagacagtgacagcacagggggaaaggccaaacttggcatagccttccatgttaccctgtgccacaggctggctgtcttgggatcattggctttaggacaccatctctcgattgggtctcctcaaagccaaggactaagtccgattactctctgtgtcctaaccaaggccgggcccagagaaggtgcatagcaaaaatgtgctgaagtagatgaacttgggatctgaatgtttcaaataggccttggtaaccccaaatcttgccatttaagacaatgatctcttacattacagcacagtgataacactcttttacatgctgtgatttcacttcatcctcaaatactcaagtgaagtcagcaaaacagaaactgtcacctccatttcataatgcagaaaaggaaacctagacaagatagcgatactgacttgcccagggtgagtgggtgggccatgagttccagcccaggcctcctccacaggagacccttctggagcaggcacgagccacagactgacctgggatcttccaggccagcaggagtcttgcctccaagagcaccctctctgaggagaggatgccaggatttactggcaccttcagtatcctcctggcttcactcctctttgcccaaaaacaaaccacacctgtttctacctcccagcctttgcacttaccagtccccatgtctccccccatcccccacatgtggcatgccactagcctaccctcagtttcctaaaaggcactaagatctttccagcctcatggcctcaccacatgctgggagctctgcctggaatgcttttctttctactcttggccaattcgggccttggggcccagtaacacggttgagagatttactcctgtggccttgagagggctgaacaaatggaagcatctctaggttgcaccagaggcatctattacctgctgccctgtgcctgtaacttctgtcattctcctctccccctgtgagaacatgataaagaccacaaaggcagggaattcctctcctcttatgctgtgaccccacagctatctcgctccagctatgcctaagaaatctgtcttatcactgacatgcttgttgtccccactcgttccctgagcctccatccaacaagtcgctccaccacatgctggtggatctcgcttcctatgctcttccctagatcaggccttccctccattccctctaccactgccgtgccttgaggctcatcctctctcacatggatcccccgcccctacagcctccccactgccctcctgacctacagcctctcctgtccatttcccataccatggctaaggacacttaaaacccacctgaccagccatttccctactaaagctctcccaagacccggctcccccccaatatctcaagagtggcactcccaaacctctctcagttcaagcacccgcgcctctcacttcagcctcattttccacagttgcctgggctccagccactccagggcccccagccctgccccaaacatgctggcttttctaacactttatgcctatctttctgctttgccctcacaccttccatctgcaaaattcctattcattaatgggcaaaccattctggaatgctttctatgtgccagacactacctaggctctttttataccttatctcatttacttctcaaagtacctcacaaaaataataattattattcccattttacagatatggaaactgaggctcaagagaggcagggcaagaactggactcctagtctatctgattccaaacctgctgtgcaccaacctctctgggaagtgcaccagcgcccccactcccccagcccagggcagagtcttctctactctgtggttccatagccccctggtttctcgcttgtcccggccgttgtcaccagtgactgtgtgcggctgtctctgctgccccccagcgtgagcatcccaagggcagaacctgggctgatctggctgggtccccagcacccagcagggtataggtgctctgtgaggtttcttaataaagagatggaaagccagaagcagtttgggtggttgagatacccagccctaacctaactaatcctgataccagtgaccaaaagcgggaccttcgcatctttgctgccaaaagacagcccctcctaaagagtaaaggcccgaccccctgcacgccctctgcctgcaccgcacgtgcttggttttccccgcccgggtactggccgccgggccgtaccaatctccgcgggggagcgcccggggtcggactgagggagcgaggggaataaccgggcgcgccccttggaagcagggctcagagctgctctcctctcacgcattccccggatccgcgcggagcaggctgctggccagccccgggcccgcgccaagcagagcctcaggtgcggttcccccacaagcaagtggcgcgggcggcggcttagaacggcccgccccgcccgccgcgtcggcgcctgccccgttgtgaggtgataaagtgttgcgctccgggacgccagcgccgcggctgccgcctctgctggggtctaggctgtttctctcgcgccaccactggccgccggccgcagctccaggtgtcctagccgcccagcctcgacgccgtcccgggacccctgtgctctgcgcgaagccctggccccgggggccggggcatgggccaggggcgcggggtgaagcggcttcccgcggggccgtgactgggcgggcttcagccatgaagaccctcatagccgcctactccggggtcctgcgcggcgagcgtcaggccgaggctgaccggagccagcgctctcacggaggacctgcgctgtcgcgcgaggggtctgggagatggggtgagtgccacggcgcaggggttatggacctgcgagaagattttctggaaagggccctgtggcaggctggtgggtactgatgagtccacgttcattctccactgtggcactcatcaatttttacgacctctgttacatcgctttccacccgccccccagcttgtttccctcatccgtgaggtgggagcggtaccacccaccattcttagttattagggatattcgagaactcctccccagcccccactgcggctggtgacccctggcacttccctcccctctcccttcaccaggtagagcgagctttggcagtgatagactggatgggcaggatggtatgggttttgccgtctcctgagacagccaccagacggggaacatgcccgactggaacaggtgtgtctgccctgtcctctgtcccacatccatcctctcgcccaggctctggagcccacatagcagcaactcttgagcctggcatgcttagaaggcagcggagaggaccctgcatgtcctccaaggtagaactgaggtcctcagtgaatcgcgcagagttgaaatcaacccccgccccgcaccccccgcagcttttcccaagcgaggaatagcaactcttccaacccccacctcccttacctagagctggagaaactgaagtgggaggaagcatgcctaagttttccttagctgatgccttgacccctggattcaagtacaaatccggtagaccctgggaagtcatcacagctgtcctggtctgcgtgtgtgtcttgcatgaagcccctctccctctttctaagtctgtattctgtttgctgagcctctctgacatggatttttctttagtaactaacggtcgcctacaccgcccacctttgttacaaaaataaagcttgctaattatggaatttttgaaaatatagacaaatgaaaaaaatttctggtaaatcgactatccaaagataccttcctattagcattttagtatatctcttgatcattttctttatacacattgcatagatacaattgaggacatgctgtagatatagttatgaatcttgttttctcccccttaatgtaacatcgaggtttcccttctgttaatcagaatcacttacaatgtcctagtggttgcaataacccaccctgcagctgtaccacactttaactgtgacctaggcattggcattgcttcttgtgtgattatcgctgtggttatctgcccctcttggtgtgggtgctgctcgtagcccttgaagaggaacccagctgctgccctgtctcgggggcgagcagcttgagctgccccatgtatccagccagtagcctctgacagccccttctctcacttgagtccttttctgttccctgtgtcctttgatgtccttagggacatcaatggatgaatggacttgcccttgttcatgctgttaaaaatgtttttgcactgggcagtgggatagggatgttctctgtggtagtgcttcctggagaccccattccgtcggctctgccatccacaggctgggagctgtgtcttccaggaggcagtgaccctggctgtcatgtttttgacttagagtttgttccttaggagaacttgtactctagcgaatggttttaaccaagccacttaatatcatgtcaggaacatttccccatgttgttatcagatcttgaaaacttttttttttttaaactgggtgcaaggatttacatcatggaatgtaggaagggctggtatgaaatgcaaaccagtcagttcagctttctgggatctactttggtgaaagattgggtggagtaggggagggcactgaagcacattttgttatctgggcatctccattagacctgccttctagatccttggtccttgaagatactccccagtggcctagtttgcctctgtgggtaaggtcccactgttgtgagctggtgaacagcccgtcagtgacagtattcaagtagagaccatggattctgtgaagggaagtcctgtgacgggtgagagattgaaatagataccttggcatctggtttcttggccaaaaaaaaaggccagctgtgggagtatgggtaggtgggtgcatgctgggggaagcgggagtctgtgttgatatttcctaatccttggagggctgtcctgtgccagacgtggagtttgcagagttcatcaggacaggagggatatatatcctattctttatccttgcctttggattgggggctcttcgttcagaagagccctctgacacctgcctgtgtcctcagggttcagcacaggacctagcatgagatgttggtggtcccagtaaaattttgagctgatttgttgtgtgcggctccaaagagtgaggccaggaataggagtgggatgatgggtgcaagttttgatgtagcagaggagtcctttctgacagctgttgaggactgcaacaggctggggtgggtgaggatggagttccacatcactgtggatctgcttgaaactaagtggctagattgttgggggtaactgggaactgagggttgacagtcacctaacctagtcctaagtcagaatgagaacattactctcatgcttccctctccaattccgtgtggcttcccccctcacctacatcacttccccagctgaatagaggccactttggggctgcgtcaccaagggctcatctaggctgagaaaggagggccaagagtaatgttgtattaacaggctcagtgactcaatggtcagtgttgaaatcctgccccacctccaccctcctgccctcaaattcaacagcaagtacttgagttgtaaaaattagtgctggatcgggcccaaccctcatgttacagatgggatcactggagtctccagaaagaagggactttcccagggttatcaaagccaggctagaactcagatccatctcccagtctgtggcctgactccttaagccaagagaagggttgcaaggccgtgaagggctgagtgcagggctctgtgcattgtaggtgctcagtggtttgctgaatgagtgaaggttgtctccatggtgcgggtggcagctcatcccttctcaaactttttgaggaagctccccaagcctgccctagtggattagagcactaagatcccccagagctttggctgccaggtgaatgccagttgccccctacccacactcagtcacacttcagactttccaaactcttcctcctggcctatgaagtaagccccaggtgaacagcctccactgccatcacgacttcctctcctagtatgtcacccaccatgctgcagacgcatggtggtcttcctgttcctgcagcattactcccaattcagtcttacctcagcgcctttgcatatgctgcctgtctgcccaggtcttcgcatggctggctttacaacagtcaatctcctctcagaggtcttccctggccaccctatctagagagccacttccaatctagagagccacttccaatcaccacatcttcttttatttttatagcctttatcactacctaaattttcatgcgtgcttatctgtttaagcaattgtctccccagtaagaatatcagtccctttgccggccgcgtgccatggctttcgcctgtaatcccagcactttgggaggccaaagtgggaggatcacttgaggtcaggagttcgagaccagcctggctgacatggtaaaacccctgtctctactaaaaataaaaaaatttagccaggtgtggtggtgtgtgcctgtaatcccagctacttgggaggctgaggcaggatagtcgcttgaacccaggaggaggaggttacagtgagccaaggttgtgctactgcactccagcgtgggtaacagagcgagactccatctcaaaacaaaacaaaaagaacaaacagaaaaagaatatgagtcccttggaaacaggaaccttgtctgtctttctcagtgctgtgacatctagcacagtgcctggcactggtaataggtacttagtaagtatctgttaaacgaaggaatcattagtgggactgccccattcctcttggaggaagccctgcttttagcttcagtgtgattcctcgagccttccttgggcctcctctgtccctgtaaccacctgtgctagggactgggtgctggggttgtagctgttccctgccctggaggtacccacagtctggcaaggagctggctccaaggctgagtggcaagtgggcagagccagtctcaatggtcacccttactgcttcccagggcttattagaagcccgagagctggggttccaggcctgacatttttctgggatgtggctgggggcttcacttcctctctggggatctcactccttctatctggaaaatagggtcagaattctcagattctcaaggatggagggtttgagttaacctgagtgtgagtgtttgtgaacttgtgacattcatgttagtccttgtcatttgtcctgtgttacacattcagcaggcccccaacactgtagagagtggcagaccctgctctagggcatccaggaaggcttcactgaggaagggacttggggtgtggacccttcattttattgattgagcaccttctgtgtgtcagctgcagtccctgcgtttgaggaagtgagaccagggggatgtacacaagatgactgtgcagagtgatctgagcaatgacaggaaagactgccaagaggtgagaccggggagcttgatcaccctgaggtcagggaagtcttcctggaagaggtgacattcagtccggatctggaaagatgaatagacatcagcaagacaggcaagaacattcaggtacaggaaatagcataaatagaggcatgagatttggatgggagaggcagactgactgcagggcctctgagtgaccaactgaggctgaggtcttggtgtactgagagccagagacaagagagacagagaggatgctggatccaggcctgtggtggctcacctgtgtctgcagcaggaggaagacttgagagctcatgggaaaggagcctggtgcagttagtttattggcctccagcactttgagggcctcctggtatggagctgctggctgatttgagggcctcatgggcagggcccaggggtaggagtcaggcctgggctctgtccagctcctgcttggccaccgaactgctccgcagcctcagcaagccactacccttccttaccctcagtctcctcatctatgaaatgagcaaaagtgtcataagaacctgtgcagattatggtgcagatgcagacaggctacaccctgtgaaccttttgggtaaatcaatagaaatgggaaacacaaactccttttcttattagagcagaattagccattctaagccctgcctctgcttcccatgtgaccttgggtataacactgcctcttagggcctcagccttctcatctgcacagtgaggaggactggttgagatgacccccttggcttccttacatccctgctggagaaatgcgattccattcttgtccctaactgctgtgggactcttgaggtcagccacctcctcattcttgtcctcagcttctccttgtgaaaatggtgcactcatccacttggggccaaggtaagtgccccagaagaacctgtctccccatgcttgcccatatattgtgatggggacgtattttggagattccttggtgacctactcgcaagctagtagtgttgccatggcagccccttccactgcagtagctactttttgaatgtgcttggtcacagtgggtggggtgggggaagtgggcccctggggtcctcagcaatcatgtccagggtcctggatgtagatccatgttcggtatcaggaacatggcattctaagagtctcacttccttggccttacctcttggaactttgtgaaagttctacttgatgaaaacggaatacacaaaaacccaggtgtatggagtagcccgaggatgggcttatattccctttcgggagatcttctgtggataaaaattcatttgtggattctagcagagcacaggtggcccaagttagcagcactcagatttcaacaaatccaccccagcttcctaatttagtgctaatggggaaacctagagaggggaggaagaggcttagcgcccctgcaggtctacagatgctcaggatgcctggctccctgcagcaggccctgaggactgacagtgcctgcagggtcctgatggcccacttcccacctggcacacctagcatagctgtgtgctggctctccagtagtttggcttcccctttgggccagatgtcccagtgggccctgctttaaggatacctcatttgcaaaacagaaccgttaaagcgaattgttaatcttttcagaaaagaactcactggcgttttgggaccagttctatagctagctagctgccctagggctcttaggcaccagtggagggagtgagctctgactggctgtcttctctgccttcagggtagaggccaggactcctagacctagcatcccagtccttcatgcctccctgtttctctacttttccaactagactcacagtctctgtgctgcagtctgactaaactgcttgcagttaattcctcaaacttgtcttctctctgtttcgggcctttgcaatgccttctgggatcctgcccctgtaccttcctcctggaaggcatccctaagaacaccctcctgtgggggttggggcctcccctggattcctagtcctgactgatcctttatgtataattgttcgcagctttgtctcccagccatatcttgggtgggcagcccaggagcagaactcagcctctagcagatgcccaagaagcagaggagaagcagagtctagaagctcccctcctggtgtggagcctggggtgtaaagggtacttagaaagcactggtatgaatgttagtgtttgggttccacccttctctctcccttcctctggggccttccaccattgccccgacattaaccaccctccagctggagaagacctttccctcctgattccccagaaagctctgcttgaccctccatcatggcacaggtcagtcagctgtgggtggacttttttctatctttgtctaggccctgtttattcatcacagtcctctcaagcattcagtcattcagcaaacatcgatcgagcaccttctctgcgcctgaccctgtgctgagcaccagggcccagatgaatgagacatggtccctgcaaatgcacacacataccttttcccataatgagaaagggctgagtacaggggtgagatgggacaggcagggatgcggtcaatccaacccaggtggaggagaaggaagactttccagagaaagagtcaacaggttggtctctagcaggccagtgctcagtgcctggtggatgcctggtatgcatgtgctaaaagactgaccaaactagacttagaagcaatagaactctacctggaggcactgcagtgaagtccctccttcctggagggaacgagtctctggctgagcacatggtgaggcaccaagtggagacagcttcctgtgtgaggcttacgggagcccagccctggcctgggattctaatagcagtgggcatgaccctccagagatggcagctttgccatgaccggcctctcatcatcatgtgtgtggactcccgctgaaaggtgtctgcctggaggagcctggaagagagctcacctccagccttgatgaagtggcatctctttggcacttggcctgacttcctagacctccctggggctggaagagcctgctaggggtcaatatgtactgaccctcactctgctacctctcctcataatatacaacctgttactgtgcacctcttaaaaaactgtttgctctctctgtctccgtgcaacttgtcctcagctctttgggggtaacttgggggtgactttctcactcacctagacccagggcagacattaggtccagatgggcccaggtgtggcatccttggggttggggatgtgggcagggtgacccccacccccacccctgcctcaaggagcccaagaggctgttcacacctctcttagctggcatctttctggctctctcacattgatgccagacattctggcccttttccctaagttatttagattccttatgacaatcctggattaaagctaaggaggacactgagtcccagggacagggagtgatttgcaaggtctcattgcaggtaagaatcagagccagggtttgaatcctaagttagcctgtcgcctacgcctctgttcctaggcagggcaggcattattttacccatcaaacaggagaggacaccgaggcttacttggtaattaatcagcattcatagagatctttactttttatgaagctcttggctatacattatctcatttaattcccacaacaatctggtgaggtaggtattagccccactgtatagatgaggaagctgaagcttgtataggaagtgactcatccaggccacttcctacgagttagaggccaggttctcctgactctcggcccctgttttcggcactgactccaggttggcatgtcccctgccagatgccagtatggaggtgaggtgggtggaggacgcggtgtgggctttcgagaggcgtgagctgcccacagtctctgtctaccagtgcttcgccatgtacgctcagggcctcctctccataggccagggatcctcctgcccctctctctatctcattgccccaaattatttttcttcatagctctcgtcgctgcctgatgttacatcatacattaatacgtaggtgttttatctctccctcagcagaagttaagcatcctaacttaactttagccagtctgacttgggcatccaggcctatagctgcctctgaggcaggacatcatctgctgtgctcactgctgtttccccagggctagtattagcgcttagtaccttgtatgtgctctatgccttgggtcttagctctgtccccacccacctcacccaggaagccacctttgactactcattccaacttctttattctcagcttctatttcaggcagtcactcacccccctttctgggttcttgagtatttgggtctgcctcattagaactccctgcaaggctttgttccagcagtttcccccaaccacagtgcgcactttcctcctgtttgacccctagatcttgtcttcagggccctggcgaagcctcatggcctccttggagcctcctctgcgctaccatcactctgcgacctcttcttgtaacacagacctgtggccatgagcctctggaaaaactctgcttgctcactacatatactccttcccactctggagatgggaggagcaatgccagtagccaccacttaatcacctaacaaatgccacatgtgccttaaacgttttaaaatttaatgttcctggctgggcgtggtggctcatgcctgtaatcgcagcactttgggaggcctaggcgggcggatcacgagatcaggagatcgagaccatcctggctaacatggtgaaaccccatctctaccaaaaatacaaataattagccgggcgttgtggcgggtgcctgtagtcccagctactcgggaggctgaggcaggagaatggagtgaaccctggaggcggaggttgcagcgagtcgagatcgcaccactgcactccagcctgggcgacagatcgggactccgtctcaaaaaaaaaaaaaaaaaaaaaatttaatgttccccaaaatcctgtgaggtgaggattatcaccctcatcctatagataagaaaaccaaagctagagttaggtgacttgcccgaggtcacagagccaggcaagggcagagctggcccagggccctctttctcagatttagggggttggggctcagacactgctgccctcaggcatgtgagaggaagccctgaaaacttgggtttcatcagccccgaggtgtggccttcctggtcactttgatatcagatattgggcaaagaggtgctcacagacacccttcaacaccccagccctgggctgggccctgggtctgagaactgcttgaaagcacatgggttgcgggggtggaatccagtctcactagaacatccacatgagactttgagcatgatatgggcagaggagggagctctcctttgccaggatatgttcctgaagtccaggtgtgggctggcgtgtttggtggggccagcgctcaacagcgtagcattgtagagatgatgagggactgggagcctgaataccttctttaagtcctggctcccacaccctgacctcaagcaagtgattttgcctctttgggcttcacctcacctcagtttccttctctgtgaaacaggattgccagttctccccttgcctaccttcccagagagtgctgtgggacggtgaagccccacataggcgcaggagaaggggattgctttccgggtggtaaaagagctgctctgggcctctctggcagctctactccctctgccttccccaaaggtaggagcaaatgagctgtgtgtaaagcaagtgctgcctgggagcagccatttgagtcttctgttgggaatcttcccctacagcctgtctcatctgcccccataaaacagagacatctgtaggtagcagggttgtgttccctttataggtggagaaacttgtacctagggagggcaaaagaggctcatcccccatctctggggtcagtcctcagtgatggggctggttttgcctcctgccaggcagcccagtctaacttgggcatccaggcctatagctgcctctgaggctgctctggatttgcttatggatttgctcagctatgcagtaaacctctatgagcccctcttaccacagatgaatcaggtaccaagtcctggcacccatgcgtcactggcagtgggatggccaagtaaagtgacattggtgctgtgggagtgtgcagagagagtgcagatgtggtgagggggcagataggagcagggacttggctggatgctgaggctccctggtggccccacccaggagtcaggaacagtcagactgggtgtgaaggtggtggcatgtggtggcatctgattgcagcatcggcatccccaccagcttctgctggactcctcccagccacagctggggcagaggaagtactgacagccaggtggcaaggactggcagtgttttgggggtgcccaactgaaccctcacttcccatctgcctgagcaacggtaccagaactactgcaagatggtaagctctaggtcccaaataccctgacaggagtcctcaggagggtgggtgccagagatcacagacttcaccctccttacccccatttcatagatggggaaactgaagcccagagaggtgaggagacttagcatgggagttggtggcagagctgggtctagaaacccaagtcctgctgccactctacctgctgtagaagatgcctgctcctgacccacccctctgaaggaaaacagatcattcatttctccccttccccttccagctccccaccactgccccctgctttgttgtggggagcagagagaaggaacttggggacatgcaacatcggagcagatgcaggcctgaaggttgggcctgaattgggttcagctttgccagcatctggctgagtgaccttgacccggtatcaccatcaaaatagggtgttggtgccaaactcacaggagtccaagtgcctgtgcaagggcatggagggtctcccaaagctttatgggcctcttgtgcatcatacctttcactcagccctgcatggagggaactccgggggcctgaagagtggccagagcacctccttggggctggcctgacagggcactggggatccagatatggatcagacccaggcctggccttcgggcagcttccagtgtgatggagaatcagcttgtaatcagcagttagaacaaggccagaggctgtgggaaccctgaggaggatgctcttttgtttctccattgtgcgggtctgactttatcttcaaataggttatttctgtgggtggcaagatagcccctggcaattccaggcctgcatagaccttagtgtttatcatcccagagaaggaaaggccttctctttccaaaggcttcctggaagactgctgccttatcaccatctctgggttttgaaggatgtattgctttatctcattatcagggaatcatcaggtaagcaaagcagggaagggcctctgcctagaatatttctgaggtggactgggggctcccactggcccggggttcagcatccatggccaggccagctcccaggccacggcctccatggtcagccaggttgggattgcctgagagggcctgggcctgagaaagcagaggtgcagtcctcccagcttccctctccaggagcctcccaactctaacgcccacggaagcacttgccatttggtatttgggacttagagctcaccaccttgcagcagtcccggtacagttgcccaggcagatgggaagtgagggttcacttggtagactgcatttcccacttgttggcagagcgagctgtgggcggtagttggggctggataaggcagggtgagaaccgaaccagcagtgtgggaaaagcctgagcctgcagacccaccttgctgcgggacttgggagactcccgcaggccctcaatttccagtctgtataacggggtgagggttgaacaagatggcgtgcgtttcctgcgctatgactttacctaattttaagacacctaataagcttagcagagagatttggattaggcacgatgaagaatttttaggtcttctcagttgtttcagttggggatatgtcatcagtgaaatttctatactcctcctccaagctgcatgggggctggccctggcgtcaaggtagggagctagataagttgactcccagcatgcctcttccctacgcacccctcaaaccactggcttcaggggcctgtctgcaacgggaagcaagtcagccacgagaaggcatgctttgcctttttttcctgccaaatagaaggtggtgttccccggtgctgtgtctcaccccagcccctacctgagtgtttggactgaagcatttatagtggtgtttctcagacttaatcacctggggatcttgttaaaatgcagattttgattcagtaaatccagtctggagcccaaagtcctgcatttctaacccgctcccaggtgatgctgatgctgctgttcccagaccacgctttgagtaggaaagtgctagagtacattttgtcttctgtctagccagggcatccagcctgcctcagatggaacaggaactcacctgccacttaaccagcctccggtggccatggctcctgcttcacttcatccagcatggctcaggaggcagagccagctgctggaagatgacttgtccagccccagcccttggatcaagggttcaagcctgtgcttggacttcacttccctcccttatatactcacccagtcctgtcccacttgtaggtgaaggtgaaaggttatgagaccctcaaggataagcatgtgatgaactcatctggccaggtcccactgctgggcaggttgaccaggccctgagcatgaccctccgactgtgtcctgtgtacagagcctttgcactcagagctgctctggggaaaggggaggtcctctaagcagggtcaggaatgctgggtttcagtcctggctctgccgcctactgcctgggtagccctgggctagtcagtgcctgtctctggtccccagtctccctggctgtccaattaggctatactggatgaccccagagggctctcaggctctaagatgggttgctgggcaagtctggaggtgggaaagtcctatgaaggtaggatttttgtaaagggggcgaaggagcaattatgaggcagacctctggaatggctctatggcccagcctctttatttgcttttgtgagttcacatcctgccgcctccaccccagttatgccagtggtgttattagatgctactgaacacccaatttgtgcactgaggatgtggcagtgaaccctgcaagcttgcctggggtcacatagtgagtagaaccaaagtctgaacctaggtttgactcttctgctaaactaagccctttccctctgatgcatcacaccagggaaaggggccatcttgaggcctagcatttccttccttcctcctaaaagtcaaagcagttgttaactttcagctcataagggtagatatctttctaaactctgctgtggctttgttgctttgcagattttgaagaaaagcaaaggcttgagtgtaggcccctaaatccgtctttctccctgctcccagcttgtaggctcagttgaaaggtcatgagaccctcaaggacaagattgtgactaactcatctgtgctctgggtctttcacagagcagatggtatgaaggaatatttaatgggcacacagtaggtgcttggtgaagatgtgttgagcaaagggcatgtagtgggggttcagcaaagaggggtttgaggtggcccacttcttcagctgccggaaggaatggggtatgggtgaggaaccttcacccatgctcttccccagtgctgtctcctgcagtcaccaggcttcctgtccctactgcccatcagctgctggagtccagggtgtcatcctaggggcaccaagccaattaagtgggcacatctcgtcctaacttccaggcttggcacttgattgatagtgaacataattacagccctcagtgtccttcaggctgcctgaagctcactggctactgggccctttggggaagcaaaggctcccaccttactcctttctgggccccacgctttgggcactgagatgaggctgaacatttacatctctctgaaagtggtagtggtgtggggaatcagtggtgttgggggtgggggcaagagggttcagctccttggagaaggggtattagtctgggacatacagaaggcagagcagggattggggatgctcaaagtacacttggagaaaaaaaaccattgcaaattggatgttgaacctctgtccttggcctcacagacagatagcaaaattaaatatttgtactagattcagataagggacaggagtttgactggggtggaggggatgggagagaactggcaattatgagagacttcccaaggcctagcccttggactagcctctttagatacttcatgtggtctccaaaatgaccccgagtgcgataccattcccattgtgtatctatagaaaccagggcacaggggagcatgcagacagcccagagttacaaagccatgaggtggagggctaggatctgaacccaggtctgtctgattctatagctgatgctcttctcatatctagaagggtacctgtgggaggtgaggtttgtactggggaccccatgactggagagaagggtgacagtggactgacatcttccctctgctgtaggcactggatccagcatcctctccgccctccaggacctcttctctgtcacctggctcaataggtccaaggtggaaaagcagctacaggtcatctcagtgctccagtgggtcctgtccttccttgtactgggtaagctgggccttagagggagggcaggtgggcaggcagtgtccacttccccaaaagaggtagagcaggagccctgctctacaggggtgagggaataagagtaactcttacacatgctgccccacagcacctttccacatctatcttttgggtcccagatcaagtgctctacccctcagcatgcatgaagattcagcaagattcagtgggaggtggtgtgatagttcccatttacagatgggaaacctcaagtcttagagaagataggtaacttgcccaaggtcacacagatttgaatccctgtctacaggacccccaaagcctgtgcctttcccacaatgccaccctgcccaccaacagacattttccagcaggtatgttactttgccttaaggtggtttggtgccaggtttaagtcctgaatctcctgcagacaagctctgtgaccttacacaggttatttgagctctctgagtgttagtttcctcattttgagtgtgaggaaagtgcctgcttcacatggcttttttgaggattgaagataagaaatgagagcacctggcacagggcctggtcatgatgggcccccattacatgggaatcatcgggaggtgccctcagaccccactcccagcccacacccatcctcagctgagcacattccccaggtgcttcccgaggcctgctccctgctatctctcagcacagcccacatcggtgctttggttgctttttctgcaggtctggctagataccctcactccttaggttgccatccaggccaggggcaggacaacacgaatgtctgaggggagggaagaagcctcttgtttttccccagacccctgtgctctcagcatagcaggtagcttcctcagcacgtcaaggcagatgaacctgctccagagcatcacagagtgcattccagtgcctgtgagccagtccctctgggcaacccactcttcgggactgtataggctggtaggggatcatcaggacttaccatgtcagtgctgagcagctgtccttcaggcaggtgcatggggcgctctgagactgagaccatgtttgcagggccaagggatagaacttcacaggtgagaaaatgcaaattcacaaaggttcatcaactacctgctactgtgaagctcattaaatggcagagttgggattttagcagaaactcagtgcattccccagggagcccacattcctggaagcccagaattagtgaactggggctgaaacagccagtcttcacctttaggcccaagaacgggctttgagtggggggatccatgaacccttaaaattagatgcaagattatatatgagtatgtgcacatttttctggggagaagggccatagctgtcctcaaagtcttacagggacaggtagcctcaagaagacaaacactggttggaagaactgagcaaactaaacagtctccctcaggactcagacccctaacatggcttgcatttggccacttactagaatcctagagtagtgagcacagtgtgaccccttcttgttaaaaaaggaagtggaggcctggcgaggatggagccttacttggggtcacatgagaagaaagtactgggaccaggacaagaacccagggactccagcctcccagaccccctgcctagtctgctacaccagctctctttgttccctgttgcaccccaaagctaccactatccctgtcttaatgggtctgggcctggctggtagggagctgagcagcttgtagaacaccagctcacgcagcatgtgatggggactggccccaggctataggttaataattgatcagacccaaccacagcccagaaaccggcccagcatcttctcaacaccctcgcctggcctcacctcgcctcgcctcgcataggtgggaacctggcctcgttggacaggcagatctcctgagctactgctaattactgccctcagcagccccagccactccttccctctgcctctcaaacctgctggcagaagctcacctggcaagcaaagaccgtggtggccctgttggtctctccctggaccagagatttttcaccactttgtgccatggaaccctctgtcattttgatgaggcctatgccctttctcagtgttttagagtatttaatacaaggtgcattggatttcaaaggaaactactgataataaaatataaatatctatacattaaaaaagctgattagacatgtagtaacaggtgcctttttattacagtaaataaaaagatctagcagcacatgtaataattactatagttcttaagtagtgatgagaagaaatgattttttttaagatatctgcaactgctacaaagttatatgaaaatacctttgttatttatttgtgtcataagtactgctgataattctgtgatttattatattggtaagtgaaggaaatgccacatttccataagagataagtgaaaatttagatgtcatttgtttccccatccaagtccatggatattgtgtgtcaggctgagtaagttcaaacatcatatttaattttcccaataccctgtaaggaaattaaggcttaggaatggggcttggccagcaagtggcagggccaaggctccaggtctgtttggtctcagagtccatgctcttcaccaggccacactgctgccttccctgccattgagcatccacaggctgccctgcaccacaggcctcgtggcttcagaattttgtatcacaagtgtctttgtaggccaccataatgtgcaggaagcaggtgatgtgtgaaagtggtcctgagccttccatgtgtggggcaaagcagggccttctaagcttctcatgagctcagcaacagtggtttttactgcagccccacaacctaagagcatggaaccagagcctgttgttcagaggacaaggattaggctctgagaaaggaaggtcatttggtggatttagttcatccttttgctcttcctgtgtttggtttctggggctggagagattaatctgacctggtttctgctcccaaggagctcgggctgaagggctgtctgttagtgggagtccaatgagggaggcagatgatgaaagggatggtgagtggtttcagagagggctgtggacacataggggaggggagggagcccccagctgagaaaggccaggctagaattcagtctctggataccccatcaggcctcttcttctccatccaggctgcctcagcagcagagtaaggacaagtgggtagggttaccccccttcccagagagaccagccctctaagcagtggggcctggagctcagccccctctggtccttttacccctcaagagagttagagatttctggaagctaggtttccaggatgctcagaccatagcctaaacctcatcgtccctatctggcccacctggagcatccacctagaggatgccactagaggagcctggatgcctgtagagtctggggggctagagtcttcccttttcaggcccaagaaagggaatcaggcagactgctgaacagtaagtatgactttgtaggcagcctttagacatagctattcaccaagctaccgtaagcttttcacagtttgcttttaacaggctcttgtaggctgcacatgcttccctagaaacttgtcttcccttctgcgatgtcacacccctaagctggtcctgaaaaattggacatctcgtcactctgtattcactgttcctcccaacaagagagttgtaccctgtttttagctaccctggggagaggctggctcaggagtctagaacagggctagattggggggcaacaaggggctaccatttccctccctttaggctcatggagagtctacatccagccttatcttctcccatgggaaaccaaaggaggctcaacatggtgagaagagagcatgacatccagagccaggcagcctacagcacctgggaccaccagggaatgggcacacagcaagggttggcctcccttcttgggcagtggaaaaagtcctagaaggagtccatgcttctcccaccaaacatgagtacctgctgcccttgcccttgtgctgaatgccaaggaccaaagaagatgcctccccacccagtgtgggaaattcacaggcaagagatgatatgtagatagtatgatattggggaacacttcttgaagagctgaggtctgagataggccttaaaggttgggtaaaaaatggaaagagagaagccctgctgagggcagctagtggcgagccatgagataaagcaggcatggcacaagctctccttcctttctgtgccaggctagattagtctctcttatgacctacaggcccagaacatggtgaccagtggaagccagcccccaggcaagtcttccaagtgtgctgttagggtttttttttttttacttttgagacagagattccctctgttgcccaggttgcagtgtagtggcgcgatcatggctcactgcagcttcaaactcctggcttaaggagtcttcccatctcagcctcctgagtagctgggactacaggcacatgccaccttgcccagctaattttttaaatttttttgtagagatggagtctcgctatgttgcccaggctggtcttgaatttctgagctcaagcagtccaccacctcagcttcccaaagtgctgggattacgggtgtgagccactgtgcctggctgctgaagtttttgaagacagggaggctgatgggctctgcgctttggcctgggacttcctggattgccgttatgttggaagggagccagccctcctcctgggcaagtgtcccctctccggtccctctagtgatggtctgggactttggtgaatttctaaagcctaatacagagaacggactgtagagtcagacctgtgtttgaatcctggctctgccactgtcctgctgggtgaccttgggcaagttatctcccccttgagcctcagtgttcttatctctaaaatggggcaaagtcaccctgccttacacttgagacagtggctcagccccagtcttgagatgcagaggcactgggtaggtgttccctccccttatccacagtgtctgggctgggtgctggcatgggggcgcacacaaggaggggacagtaagagcagcttcacaagaagctgaagcctatctcctttggtgctcctgtccagataacatggagcccatgggcccctcgatgccaggacagtccatcagagtctgggagatgaggctcctcttgtcccaggaatctgctcctacctgggctgaacattcctgtagctatttctcagggtttgtgggccccatgcccatggccctgggtgtgcctagcttagtgccacagtaaacactcactccatccaccatggcccagaggggagatgaagcccagtaggacctgacctgtggccatctgccccccaggagtggcctgcagtgccatcctcatgtacatattctgcactgattgctggctcatcgctgtgctctacttcacttggctggtgtttgactggaacacacccaagaaaggtaagtgcaaggcctcccttgccccacctctcattctagggatgctcttccccctgcacaagctgaagggcctcatcctgagtgctgtttcttttaacacccactttgtgaaaagcactggactagtccttttggggggaggttaaaagcccctcaaagggcactgttctggtcctgacaagagttcacactcagtcgagggtttgcataacatgaaggaatgaatgtggaaaggggcctgatgggaagggggcatggtgcatggggtgatggtcacctgcttgggtttcacactggccctgtcttgtctgccttgcccaaatgtacccccacccccaccaactctgtattttattccctggaaggtggcaggaggtcacagtgggtccgaaactgggctgtgtggcgctactttcgagactactttcccatccaggtaaagtgctgtgagtgttgttttgggagggtgggaatggatgggaaatctgaactcaggccttaacccacccacagggaagcaagtttagaccaagttggtctcttcatttcctttctactgtgtcactggctgtgctggggaccccactgctcttctgagtatccatcttctttgggccagccctgaggtcctgacagggaaatggtggctcagtttggctttcagtctcagctctgtctggcccctgcctggtctgcaagctgggctggtgaggcacagccatctggccctgatgcatgtgggcaatcctggtgaattgaggataactctggcaggatcctgaaggttttccccacaggggaaagacctgtctggccagctcactccacaccccagctccagcacaccctagctgctgagtaccctgcagaaggtaggggtgctgaagagtggaggcagcacgtgaatgtgaaagagttctgtgcagggtgcagggtggtgtatatttgctgttgtgagtcagtgactgagatcctggtgtgttgcctgggggcagtggctgggtaaccctgcatccttcactgcattcggtattttgggggtggcagggccagctccttctgctcatccttagcctaagcccagtcttcccgggaccttcctgctcctcagggtcagcgttccttctccttttcctgaccccatctctctaactgcagaaaatttgaagctgtttttgttgggagaaagttgcatcataggacccaaccctctaattttggaggtaaagaaactgagcctcagagatgggcaggacttgtccaggctgcatagtctagtatgatggcaacattgcaaccaccatccaggcttattgaattcagggcccaggttcttttccactgatttcctactgcctgtttctctgggagagattcaatccctggatttccccattggattgattccagcttcctgggtctccctctcccccgttgctgctggagatctcagtttaagttcctgccctgtcactccatttattaacctgccaccattgctccctgtccagtgcagggctgtgctgggcatggggacacaagtcagccctgcccttggggtgtctattgcatcctgatagactttgtcactttctgccatggggccatgggcagactttctcaagcctgctgagcctcatctgcaaaatggagctgtctgtatgatgaaaagtaatcagttctgattgggtgggagtgatgatagactgttctttctgctttctctctcacctcaggggccaggctccagtgttctctgttgccactgtggcctggtcctctggaagtctccaggaggccagtagccccatccacttagaacaggatgacctgatgattgttggtcagacctgggacaggcaggtgtcctttgctatctgatctccacccttccaaaagaaccaaacaaacccctgtgtccttctcacatctctgttccaagaagtcagctgggagttggagccttagggcacatacaacctggccctgtgagggctccctggggcactaggacaaaagccaaactgggcccgaggcaggctggggtgttgagcctcaacccggggcttaggctgatcaacccggggcttaggctgagcctgcctctctccctctgggcctcaatctccccttcacttggccttggtgatctgacatcaggtctgacactctatgggggtgtgtgtgaccctcctgtcccacccccttttcctggcctcttgccagtaatcatgtaatgaagatctgccgctgtacccacccgcccacctactcccttcctggtgggactctggtctttgctgccagaacagctcatctggcccagagtgtatcccttctgttggcacaggtggggttcttgtgttagcaacagccaccgagaccaccagccacctggaagaggagcagacagtgccccacatcacctctccccaaagtgtaggcagaatccttggagaggagactaggaaacactctctctaagcttagaatcacctgtccatctgcctcatttcactgataggcttactgaggcacagagaggagggactatcccaaggtcacaaagcttaagtagtagcaggactagtgtaggaaccagggctgtctgctttggggcccatggtcttactcctgtgttactttcaccatcaccatgccgtgctgtgtaaacttaagcaagcctttgctcttctgtgggtctgaattttttcctctatgcactgctgtggtgggacaagcctatctgagcaccttgcctctcctgggagggagggtataaagagtgacttgataggaatgtgtcccagactgacattagcgagcaggccgggcctgggcatcgtgttgggctgggactttgccacgggaaacaggcagcaagaggacacaagagcaggcatgtcaacagaaccttcattggcggtatccttcccctccttccagaacggacattctctccagccctgggggaggggagtgtgacatgaaaacagatcagagctggtcagatgcctacattcttctgggtcctacagcaagggcattgacttgcactgtgtcccaaggcacctcattcaaccaaatgtcccatcagagccttggggagggaggaaatgatttaaagagccacctggggcccactgggtgacacatcttcatccagcagcccagggaaaagtgcagcgactggcctgctccagatgtgcaggataatttgctgtgacctccacaggggaattgcagctcccttttctaggcctcagcttccccccgtcatccaaggaatggcttagacctttcagggctctgccagcccatgcagtgctgtgggttcctggttatcggcccagtgggaaggtcgggggagccataggaaggggacaaaaagatgctgcacggcgtgatggtcacctgccagggtaactatcccaggcctggccatcagctcaggagcaagtttccaagtttcccacctggtattggctgccccagctcttccctcaatgcctgcctgcctttttcatcaaaactagcacaaggaactttttaattccagcttcactgagagctaacttggtgggcagacctgcttgttaggcaaaacattggaacagcaatcttaacagagctcatgtaaacgagattttgagatctgctcgctgccccgagccccactagctatggattagactgctgctgtttcccatttatttggggagtagctgagagttggtttggtttttgagcaactttaatctgtttgccaagggcaaagcgggagaaagagcatcagtgccccaagcagtggggatgagagtgagggagtcttgctcacatttgcacagactggcagcgtcagagctgggagtggtgccagccagccttttccatcccctctgtcacctgaagatttgcatttcaattttccaaggccagccaccagcaccctctcccccagagctgcacacaagtccttcagctctgccaggaggctcccaaatctggagtcacagaaaacctgggctcttgacattctgctggtggccagtgactctgcttccagctggcaccagtgcagggaaggggcactttgcagcactcaggtgggagtgtcattgatgtcacctcttttgaggcagggcagccaaaaagaccaacgtgttcattccttgttatccaggaattgtatttctagaagtttgtttcacaaaagcaatcagatatgtggacaaagataaggtatttattgaagcattacttctaagagggaaattttggaagcttttaaaatgtccatcaatcagggtttgagtcagtgctgttacatgcatgagagctgtgctgtagaatacaaatgcagccacgagaagatatggaactgagggattttgataaggacagatagctgtatgtttggtagaaaatgatataaaaatgatatcaacccatataacctcaattttgtgggttttgaaaaagagcatgtatatttttgagtagaaaaaggactcaatgcgtcagatggttttatctggatggaaatattatggattttttaaattttctttttgctttcctatatttttaaaattctctaggagtttctcttcttttccctctcccctcccctcccctcccctccccctcctccgttcctctcccctctcctccgttcctctgccctctcctccgttcctctcccctctcctctcctctcccttctctcctttcttcctttccttctttcctttcttctcactctgtcactcaggcttgagtgcagtggtgcaatctcggtttactgcagcctctgcctcctgggctcaagccatctttccacctcagcctcctgagtagctgggaccacaggtgcgtgccaccatgcccagttaatttctgtatttttgtagagataagcgtttcaccatgttgcccaggctggtctcaaactcctgagctgaagcaatcctcccaccttggcctcccaaagtgttgggataacaggcatgagccaccatgcctggccctattatttttctaatcagaataaaaatgatgtttttatgagcagaatacccttactcattgtctctctcagcctcttccacccccatcacattccttgtaacacagggtaggtgtcacaggctttgcctctcatgactcagggtttagggacactgcatcacccaccccttcaagcaccagccccagggcaggaggtgggccctgaggaagccaatcatcgtttagagcatcccagtgtccttagtaccacaggtcaggtcctcagctgctgcagccttacaactaacctctaccccaggctggctggcacagggctgtcgcttgtcctgtcttgtccttcctgccttagaacctgaactgagcccagctgactgtgggaaagtttccatttgggccagctgcagtgtcccttttccaggccaggggagtaggaggtgggctgcctgtctcattctgtgagctgtggaggagcccacagagcacagggccaagtaaaccctacctccaaggagctcacagtttggagagactgacagtgggggcagagcttgcagccaaggccccggttgccaaactcaggaacttggactttactcacatgaagccagacacactctccagtctaagagtgacaagggttggatttgagttttagaataatcactctggctgttgcgaaaaggatgggcccagagggagggaaggcaggaggctggcagagtgcaaagaagagctgctgtgtgcatggctgaagactgagaggaacaagggcaaacattgcccaccccttcccagagacccacagtgcaaatggtgactgcccaacaccagcactgtggccctggggatgagagtctgaggtaaggtgtggagattcattgcagccctcaggcccatggaggtccaggggaaatgacacatccaatccctccctaccctccgggtatgccccggtatccctctcccagccagtttcctctgacccaaggtcatccttgcagctggtgaagacacacaacctgctgaccaccaggaactatatctttggataccacccccatggtatcatgggcctgggtgccttctgcaacttcagcacagaggccacagaagtgagcaagaagttcccaggcatacggccttacctggctacactggcaggcaacttccgaatgcctgtgttgagggagtacctgatgtctggaggtaagaatccaccccctgtgctcctgctgggcactgttgtcaaggcctgagcctctccatcgggcagggtgacacagggagccaacacaccattccttggtgctgggcctgcattgggagatgcaacctgcttcagacatggtgggtcagggctgaggaggagagctgtccatatggtcttgagaattcaactcggataacatcttccctaggaggccttctttgacccccttttctggggacccccagcccttgtgttgccttttgtacaacctgattgttgtccatggcactgtaattgtccacctgcctgagacctcccaccagactgatgcattgggatccccaacacctcgcaccgacttggcagaattagggccctgggaatgtttgccaaatgcatgagttcccaaaacaaccttgtatcattagctgcattttacagatgaggaaactgaggctcagaaaaatgaatagcttacacagaaccagacaactccaaaggggctgggctaggtctggggcccaggtccagggttctttatgttttatacctgactgtgtgccggggatggggagtggatccatgggcaaccctgactgttgcgtccttccctcccctcaggtatctgccctgtcagccgggacaccatagactatttgctttcaaagaatgggagtggcaatgctatcatcatcgtggtcgggggtgcggctgagtctctgagctccatgcctggcaagaatgcagtcaccctgcggaaccgcaagggctttgtgaaactggccctgcgtcatgggtgagtgcctccctacacacacacacacccctccagtgcccctcagcccagggcagcagactccttggcccctgaagacaggacccagaccccaggaaggcatggaagggagtcagtcattctgttagggaggggatgttggagcccagactgcacagtgtgggccaagtttgcccatgtgtgtctgggtgggcacagatgcaacctgtggcctgtgggcccttgcaggtgggccgagagtccaggcttatatgcaggactggaccacctggggccagaatatatcattttgctgggagaccaggaggtcaggaaggagggtggtgtggaatgtggctgggggacagcagctgttttctctgtcccctggggaccttacctcaggctttggaagaagaggctgccctgcaggctcagccctgggccagcccctggggacacattcatattggacccagtccctgccttcagggagcaccaagggtgggggagggtagagggatggacagtgacaacacagtgtgctgagactgtgaaacaatggtgagtccagggctgagagaggcctggtttggtggagggaccaagagaacttcctggcagaggcaggccctgcaggaagaggtggaaaacaggcattccagagcagggcgctcagccttccctttgcctgggggacccagagctctgatatgctccccagtccctagcagtggggcagaaggcccatcagaacctggtagagagggatcatgtgaacttgggacacccaggtaattctggtacacccagctgggggagggggatgcttggccagtgtccagggcctctaggctgacatagaaactgaagccagtaagtagggtatgacagaccctggcctctcccttccagagctgacctggttcccatctactcctttggagagaatgaagtgtacaagcaggtgatcttcgaggagggctcctggggccgatgggtccagaagaagttccagaaatacattggtttcgccccatgcatcttccatggtcgaggcctcttctcctccgacacctgggggctggtgccctactccaagcccatcaccactgttggtaagcccctagcctgcagaccaagggctgtcctgaacacagggtgccatacagctaatcagcagtagagacgggattccaatgcaggccacctggctctgatggccatgcccttagccatgaggactttgaagtgttgggtgctgatattggtcaggaggggtagtagtaggagtcggggaattgagcctatgggatgaaccaagctctgtgataagtgaggaaagaaaatctgcagtctctgggtttgcagcacccactagtctatcagggaagactattgcagcaaagactagtgggggaatgtgatgaggatgcgcaggtgctctagggagtcatagcggaccccagggaggaggtaactcttgcactgctaactgataggaattatctagcaaaatagaggaggaagagaatttttatcagaaacaatagcctacgtgaagttcagaagcaagattgtgtagtttttttgaagaacagaaagaaaaacattaatatgactgcagcatagacctgtcagaagagtggaaaacactggttgcacttggccctcgtctgtgttgttttgggtgtatttgggaccatttagaggattctaaagaattacctattgtaggtgtgtgtgtgcatgttaatggatcccccaggagcacatgggcccttggcagtggacttgaggggccaaagctcacacagatcctttgcgttcctaggccaggtgtcctgccttgtacttttaggtagagacaaagcaacagggaggcagcaggaacatttccatgcacaggtgtggctggggaggggctgggtcctgtgggcaatgtgaaggaatttgctcttcaccttgagaatggagagccaccagagagtgtttgggaggggaagttcagatttgcatttaaaaatgatccttggagctgctggatggaagatgggttagaaaaatggaagccacgagaccagcccagagactgttttggtagccagtggcttggaccaagggagtagcagtggagatggaagagatgtgcatgatttgggaaaaatttcagaaatagcattggcaggacataggaatggattgggtatggagatgcagcaggataagaaaataaagcaacgcacagatcataaatgctggtctactccctcctctcctgcccttaaccacactttttattttttttttttttatttttgagacagggtctcattctgtcatccaggctggagtgcagtggcgcaatctcggctcactgtaacctctgcctcctagtctcaagcgatcctcccacctcagcctcctgagtagctgggactacaggcgtgcaccaccacacccagctaattttttgtatttttttttggtagagacgattttcaccatgttacccaggctggtcttgaactcatgagctcaagcaatctgcgggtctttgcctctcacagtgctggaattacaggcgtgagccaccactcctggcctacactttttaaagcatgtcacattccttgcagaatccttagaaaacccctatgaggaagaatccccatgtgacagatgaggaaactgagggtcagagaggcaggaatggcttgcccagagcagagcaaaagcaaagatgtttacttgatcccctgactctcatagaccctcctagcagaatgcagtgggttcaaccagtcttgatcccatctgcagcttagcacctggtggcctcgggtgggtcccttcacatgcccctgggcctcagtcttttcatctgtaataggggacaaccagagatgcagcacataaagcatttggcacagttccttccacatggcgggcccacagcccagcgtcaccaccttcagcatcatggtggatgcccaggggaagggtgttgactaaccagaagcctctgccctgtccctgcagtgggagagcccatcaccatccccaagctggagcacccaacccagcaagacatcgacctgtaccacaccatgtacatggaggccctggtgaagctcttcgacaagcacaagaccaagttcggcctcccggagactgaggtcctggaggtgaactgagccagccttcggggccaattccctggaggaaccagctgcaaatcacttttttgctctgtaaatttggaagtgtcatgggtgtctgtgggttatttaaaagaaattataacaattttgctaaaccattacaatgttaggtcttttttaagaaggaaaaagtcagtatttcaagttctttcacttccagcttgccctgttctaggtggtggctaaatctgggcctaatctgggtggctcagctaacctctcttcttcccttcctgaagtgacaaaggaaactcagtcttcttggggaagaaggattgccattagtgacttggaccagttagatgattcactttttgcccctagggatgagaggcgaaagccacttctcatacaagcccctttattgccactaccccacgctcgtctagtcctgaaactgcaggaccagtttctctgccaaggggaggagttggagagcacagttgccccgttgtgtgagggcagtagtaggcatctggaatgctccagtttgatctcccttctgccacccctacctcacccctagtcactcatatcggagcctggactggcctccaggatgaggatgggggtggcaatgacaccctgcaggggaaaggactgccccccatgcaccattgcagggaggatgccgccaccatgagctaggtggagtaactggtttttcttgggtggctgatgacatggatgcagcacagactcagccttggcctggagcacatgcttactggtggcctcagtttaccttccccagatcctagattctggatgtgaggaagagatccctcttcagaaggggcctggccttctgagcagcagattagttccaaagcaggtggcccccgaacccaagcctcacttttctgtgccttcctgagggggttgggccggggaggaaacccaaccctctcctgtgtgttctgttatctcttgatgagatcattgcaccatgtcagacttttgtatatgccttgaaaataaatgaaagtgagaatcctctatgagttattgctggggctgcatctgcatctgctgctgacacctggggaagactgggtccccagctggctgccctctgagccctctagccccttgcacctttggcccacatgaccctgccatggtgtgtaagttacctgtcactgtgtaacaaactacttcagagctcagtggcttccaacagcatctgttgtctcccagttccaagtcacgatttgaggcttggcttggtcctccactcagggtttctcacagggctgcagttgtcttggagccgggctgaggaaggatccactcccaaggccgttcctgcagttgttcgcaggattgacttcctcactggctgttgacagaggccactttcagttccttgccacatgggcctttccatggggtagct

SEQ ID NO: 3 - DNA, 36001 bp, Macaca mulatta
  source 1..36001: mol_type = genomic DNA
tcttatgctgggatcccacagctagctcgctccagctatgcctaagaaatctgtcttatcactgatgtgcttgttgtccccactcattccctgagcctctcatccaacaagtcactccaccacattctggtggatcttgcttcctatgctcttctctagatcaggccttccctccattccctctaccactgccatgccttgaggctcatcctctctcacatggatcccccccacagcctccccactgccctcctggcctacagcctctcctgtccatttcccatactatggctaaggacttttaaaacccacctgaccagtcatttccctactaaagctctcccaagacccggctcccctcctgatgtctcaagagtggcattcccaagcttctctcagttcaagcacccgcgcctctcacttcagcctcattttccacagttgcctgggctccagccactccagggcccccagccctgccccaaacacgatggcttttctaacactttatgcctgtctttctgtttgccctcacatcctccatctgcaaaattcctactcattaatgggcaaacaattctggaatgccttttttgtgccagacgctacctaggctctttttgtaccttatctcgtttacttctcaaagtacctcacaaaataataattattattcccattttacagaaatggaaactgaggctcaagagaggtagggcgagaactgggctcctagtctatctgattccaaacctgctgtgcaccaacctctctgggaagtgcactagcccccccactcccccagctcagggcagagtcttctctcctctatggttccataacccccggtttctcgcttgtcctggccgttgttaccagtgactgtgtgaggctgtctctgctgccctccaacgtgggtatcccaagggcagaacctgggctgatctggctgggtccccagcacccagcagggtataggtgctgtgtgaggtttcctaataaagagatggaaagccagaagcagtttgggtggttgagatacccagccctaacctaactaattcccataccagcgaccaaaagcggaaccttcgcatctttgctgccaaagtacagccccgcctagaggaaaggccagaccccctgcaagtcctcggcctgcaccgcacgtgcttggttttccccgcccaggtaccggccgccgggccgtaccaatctccgcggggaagagcccggggcggactgagggagtgggggaaataaccgggcgcgccccttggaatgagggctnnnnnnnnnnnnnnnnnnnnnnnnnnnnnnnnnnnnnnnnnnnnnnnnnnnnnnnnnnnnnnnnnnnnnnnnnnnnnnnnnnnnnnnnnnnnnnnnnnnnnnnnnnnnnnnnnnnnnnnnnnnnnnnnnnnnnnnnnnnnnnnnnnnnnnnnnnnnnnnnnnnnnnnnnnnnnnnnnnnnnnnnnnnnnnnnnnnnnnnnnnnnnnnnnnnnnnnnnnnnnnnnnnnnnnnnnncgcccgcccagttgtgaggtgataaagtgccgcgctcccggacgccagcaccgccgtcgcagtcgctgctgcgccgtaggttgtttctcccgcgccgcctctggccgactggccgaccggccgcagctccaggtgtcctagccacccaacctcggcgccgtcccggggcccccgtgctctgcgcgaagccctggccccggcggccggggcatgggccaggggctcggtgtgaggcggcttcccgcggggccgtgactgggcgggcttcatattcagccatgaagaccctcatagccgcctactccggggtcctgcgcggagagcgtcaggccgaggctgaccggagccagcgctctcacggaggacctgcgctgtcgcgcgaggggtctgggagatggggtgagtgccaccgcgcaggggttatggacctgcgagaagattttctggaaagggccctgtggcaggctggtgggtgctgatgagtgcacgttcattctccaccctggcactcatcaatttttgcgacctctgttacgtcactttccaccccccggcttgtttccctcatccgtgagttggaagtggtaccacccaccactcttagttattagggatattcgagaactcctccccagcccccactgcaactggtgaccccttcaccagttagagctagctttggcagtgagagactggatggggcaggatggtatgggttttgcagtctcctgagacagccaccagacgggggacatgcccgcctggaacaggtgtgtctgccctgtcctctgccccacgcccgtcctctcgcccaggctctggagcccacacagcagcaactgtgagcctggcatgcttaggaggcagcggagaggaccctgcacgccctcaagggtagaactgaggtcctcagtgaatcgcgcagagttgaaatcaaccctcaccccctacccgctgcagcttttcccaagcaaggaagagcagctcttccaacccccacctcccttacctagagttggagaaactgaagtgggaggaagcatgcctaagttttccttagctgatgccttgagccctggattcaagtacaaatccgggagaccctgggaagtcatcacagctgtcctggtctgcgtgtgtgtcttgcatgaagcccctctccctccttctaagtctgtattctgcttgctgagcctctctgacatggatttttctttagtaactaacagtcgcctactccgcccacctttgttataaaaataaagcatgctaattatggaaattttgaaaaatatagacaaatgaaacaaatttctggtaaatcgactatccaaagatagcttcctattagcattttagtatatctcttgatcattttctttatacacattgcatagatacagttgaggacatactgtagatatagttatgaatcttgttttctctcccttaatgtaacatcgaggtttcccttccgttaatcagaatcacttataatgtcctagtggttgcaataacccaccctgcaggtgtaccacactttaactgtgacctaggcattggcattgctccttgtgtgattatcgctgtggttatctgcccctcttggtgtgggtgctgcttgtagccccatgcatccagccagtagcctctgacagcccgctctctcacttgagtccttttctgttccctgtgtcctttgatgtccttagggaatgaagggacttgcccttgttcatgcttttaaaaatgttttggcactagacagtgggatagggatgttctctgtggtaggcttcctggagactccattccctcggctctgccatccacaggctgggagctgtgtattccaggagtcagtgaccctggctgtcatgtttttgacttagagtttgttccttaggagaacttgtactctagcgaatgattttaaccaaggcacttaatatcatgtcaggaacatttccctatgttgttatcagatcttgaaaacttttttttttttttaactcggtgcaaggatttacatcatggaatgtaggaagggctggtatgaaatacaaaccagtcagttcagctttctgggatctactttggtgaaagattgggtggagtaggggagggcactgaaacacattttgttatctgggcatctccattatacctgccttctagatccttggtccttgaagatactccccagtggcctagtttgcctctgtggataaggtcccactgttgtgagctggtgaacagcctgtcagtgacggtattcaagtagagaccatggattctgtgaagggaagtcctgtgatgggtgagattgaaatagataccctggcgtctggtttcttggccaaaaaaacaggccaactgtgggagtatgggtaggtgggtgcatgctgggggaagcaggagtctgtattgatatttcctaacctttggagggctgtcctgtgccaggcatggagattgcagagttcatcaggacacaagggatatatatcttgttcttcatccttgcctttggactgggggctcttcattcagaagagccctctgacacctgcctgtatccacaaggttcggcacaggacctagcatgagatggtggtgttcccggtaaaattctgagctgatttgttgtgtgtggctccaaagagcgaggccaggaacaggagtgggatgatgggtacaagttttgatgtagcagaggagtcctttctgacagctgttgaggattgcaacaggctggggtgggtgagggtggagttccgcatcactgtggatctgcttgaaactcagtggctagattgttgggggtaactgggaactgagggttgacaatcacttaacctagtcctaagtcagaatgagaacattactctcatgctcccctctctagttccgtgtggcttcccccctcacctacatcacttccccggctgaatagatgaatagaggcaactttggggctgcgttaccaagggctcatctaggctgagaaaggagggccaagagtaatgtattaacaggctcggtgactcaaagggcagtgttgaaatcctgccccaacttcaccctcacgccctcaaattcaacagcaagtacttaagttgtaaaaattagtgctggattgggcccaaccctcatgttacagatgggatcactggggtccccagaaagaagagactttctcagggttatcaaagccaggctagaacccagatccatctcccagtctgtggcctgactccttaagccaagagaggggttgcaaggccatgaagggctgagtgcagggctctgtgtattgtagatgctcagtggtttactgaatgagtgaaggttgtcttcatgatgcgggtggcagctcattcctactcaagctttttgaggaagctccccaagcctgccctagtggatgagagacactaagatcccccagggctttggctgccaggtgaactgccagttgccccctccccatacccactcacacttcagacttcccaaactcttcctcctggcctatgaagtaagccccatgtgaacagcctccactgccatcacaacttcctttcctagcatgtcactcaccatgctgcagacacacggtggtcttcctgttcctgcagcattactcccaattctgtcttacctcagggcctttcagcccaggtctttgcatgactggcttcagaacagtcagtctcctctcaggttttccctgaccaccctatctagagagccacccctaatcaccacatcttcttttatttttatagcctttatcagtatctaaattttcatttgtgcttatctgtttaagcaattgtctcccccataagaatatcagccccttggctggccacgtgccatggctttctccggtaatcccagcactttgggaggccgaggcgggaggatcacttgaggtcaggagtgtgagaccaggctggccaacatggtaaaaccccatctctactaaaaatacaaaaattagccaggtgtggtggtgcatgcctgtaatcccaactttcctgggaggctgaggcaggagactcgcttgaacccaggaggaggaggttacagtgagccaagattgtgccattgcactccagcctgggtgacagagtgagactccatctcaaaacaaaaaaaaaagaacaaacagaaaaaaagtatcagtcccttggaaacaggaaccttgtctgtctttctcagtgctgtgaccccagcatctagcacagtgcctggcactggtaataggtacttagtatttgttgaatgaaagaatcattaattggactgccccattcctcttgtaggaagccctgcttttagcttcattgtgattccttgagcctttctcgggcctcctctgtacctgtaaccacctatgctaggggctgggtgctggggttgcagctgttccctaccctggaggtccccacagtctggcaaggagctggctccaaggctgagtggcaaatgggcagagccaggctcagtggtcacccttactgcttcccagggcttattaaagccagagagccggggttccaggcctcacttttttctgggatgtcactaggaggggttcacttcctctctggggatctcactccttctttctggaaaatagggtcagaattctgagattctcaaggatggagggtttgggttaacctgagtgtgaatgtttgtgaacttgtgacattcatgttagtccttgtcatttgtcctgtgttacacattcaacaggcccccaacacagtagagagtggcagaccctgctctaaggtatccaggaaggcttcactgaggaagggacttggggtgtgaacccttcattttattggttgagtaccttctgtgtgtcagctgaagtccctgcctttgaggaagtgagaccggggaatgtacacaagatgactgtgcagagtgatctgagcaatgacaggaaagactgcaaagaggtgagactggggagcttgatcaccctgaggtcagggaagtcttcctggaagaggtgacattcagtccggatctggaaagatgaatagacattagtaagacaggcaagaacattcaggtacaggaagtagcataaatggaggcataagatttggatgggagaggcaggctgactgtagggcctctgagtgaccaaccgaggctgaggtcctagtgtactgagagccagagacaagagattcagagaggatgctggatccaggcctgtagtggctcacctttgtctgcagcaggaggaagacttgagagctcatgggaaaggagcctggtgcagttagtttattggcctccagcactttgaaggcctactggtatggagctgctggctgatttgagggcctcatgggcagggcccagggctaggagtcaggcctgtgttctgtccagctcctgcttggccactgaactgctctgcagcctcagcaagccactacccttccttaccctcagtctcctcatctatgaaatgagcaaaagtgtcttaagaacctgtgcagattatggtgcagatgcagagaggctaagactgtgaaccttttgggtaaatcaatggaaatgggaaacacaaactccttttcttattagagcagaattagccattctaagccctgcctctgcttcccatgtgaccttgggcatgacgctacctcttggggccccagctctctcatctgcacagtgaggaggactggttgagatgacccccttggcttccttccatccctgctggagaaatgtgattccattcttgtccctaactgctgtgggacttttgaggtcagccacctccttattcttgtcttcagcttctccttgtgaaaatggtgcactcatctacttgtgggccaggtaagtgccccagaagaacctgtctccccacgcttgcccatatattgtgatggggacgtattttggagattccttgctgacctactcacaagctagtagtgttgccatggcagccccttccactgcagtagctactttttgaatgtgctcggtcacagtgggtgaggtgggcaaagcgggcccctggggtcctcagcaatcatgtccagggtcctggatgtagctccatgttcggtatcaggaacacggcattctaagagcctcacttccttggccttacctcttgcaactctgtcctatttgatgaaaacagaatacacaaaaacccaggtgtatggagtagcctgaggacaggcttatattccctttagggagatcttctgtggataaaaaatcattagtggattttagcagagcactggtgacccaagttagcagcactcagatttcaactaatctaccccagcttcctaatttagtgctcatggggaaacctagagaggggaggaagaggcttagggccccagcaagtctacagatcctcaggatgcctggttccctgcagcaggccctggctccctgcagcaggcccctgcagggtcctgatggcccacttcccacctggcacacctagcatagctgtgtgctggctctccagtagtttggctgcccctttgggccagatgtcccagtgggccctgctttaaggatacttcatttgcaaaacagaactcttaaagggaattattaatcttttcagaaaagaactcactggcattttgggaccagatagatggctagctagctgccttagggctcttaggcaccagtggagggagtgggctctgactggctgtcttctctgccttcagggtagaggccaggactcctctacctagcatcccagtccttcatgcctccctgtttctctacttttccaactagactcacagtctctgtgctgcagtctgactaaactacttgcagttaattcctccaacttgtcttctctctcggttttgggcctttgcaatgccttttgcaggactctacttcctggggtcctgtctctgtgccttcctcctggaaggcatccctaagaacaccctcgtgtgggggttggggacctcccctggattcccggtcctgactgatcctttgtatataattgttcgcagccttgtctcccagccatatctgggataggcagtccaggagcagaactcagcctctagcagatgcccaagaagcagaggagaggcagggtctagaagctcctctcctggtgtggagcctggcgtgtaaagggtacttagaaagcactgatatggatgttagtgtttaggttccacccttctctctcccttcctctggagctttccatcattgccccaacattaaccagcctctagctggagaagacctttccctcctgattcctcagaaagctctgcttgaccctccgtcatagcacaggtcagtcagcggtgggtggacttttttctgtctttatctaggccctgtttattcatcacagtcccctcaagcattcagtcattcagcaaacattgatcgagcaccttccctgcgcctgaccctgtgcggagcatcagggcccagatgaatgagacatcattcacacacataccttttcccataatgagaaagggctgagtacaggggtgagatgggacaggcagggatgtggtcagtccaacctgggtggaggagaaggaagactttccagagaaagggtcaacaggttggtctctggcaggccagtgctcagtgtctggtggatgcctggtaagtgtgtgctaaaagactgaccaaactagacttggaagcaatagaactctacctgggagcactgcagtgaggtcagagagtgtggggagacttcctagagggaaggagtctctggctgaccacatagtgaggcaccaagtggagacagcttcctgtgtgaggcttgcgggagcccagccctagcctgggattctaatattagcgggcatcaccctccagagatggcagctttgccatgactggcctctcatcatcatgtatgtggactcccgctgaaaggtacctgcctggaggagcctggaagagagttcaccttcagccttgatgaagtggcatctctttggcacttggcctgacttcctagacctccctggggctggaagagcctgccaggggtcagtatgtactgaccctcactctgctacctcttctcataatacacagtctgttaccctgcacctctttaaaaactgtttgtgctctctgtctttgtgcaacttgtcctcagccctttgggggtaacttgggagtgactttctcactcacctagacccaggcagacattaggtccagatgggcccaggtgtgacatccttggggttggggatatgggcagggtgaccccccctgcctcaaggagcccaagaggctgttcacacctcttttagctggcatctttctggctctcttacattcataccagacattctggcccttttccataagttatttagattccttatgacaatcctggattaaagctaaggaggacactgagtcccagggagggggagtgacttgcaagatctcattgcaggtaagaatcagagccagggtttgaatcctaagtcagcctgtcgcctacgcctctattcctaggcagggcaggcattattttacccatcaaacaggagaggacaccgaggcttacttggtaattaaccagcattcatacagatctttactttttatgaagctcttggctacaaattatctcatttagttcccacaacaatctggtgaggtaggtattagccccactgtatagatgaggaagctgaagcttgtataggaagtgactcattcagtccacttcctacgagttagaggccaggttctcttgactctcggccccgttctctgcaccgtttccaggctggcatgtcccctgccagatgccagtatggaggtgaggtgggtagaggacacagtgtgggctgtccagaggcgtgagctgcccatattttctgtctactactgcttccccatgtgcgctcaggtcctcctctccataggctagggatcctcctgcccctctatctcattgccccaaattatttttcttcatagcgctcatcgctgcctgatgttatatcatacattaatacgtaagtgttttatttctccctcagcagaagttaagcatcctaacttaacttgagccagtctaacttgggtatcaggcctatagctgcctctgaggcaggacatcatctgctgcgctcactgctgtttccccagggccagtattagtgcttagtaccttgtatgtactctatgctttgggtcttagctctgtccccacccacctcccccaggaagccacctttgactactcattccaacttcttttttttttttttttttgagacggagtctcgctgtgtctcccaggctggagtgcagtggcgtgatctcggctcactgcaagctccgcctcccgggttcacgccattctcccgcctcagcctcccaagtagctgagactacaggcgcccgccaccacgcccggctagttttttgtatttttagtagagacggggtttcaccatgttagccaggatagtctcgatctcctgacctcgtgatccacccacctcggcctcccaaagtgctgggattacaggcttgtaattacaccgcgcccggccccaacttctttattctcagcttctatttcagacagtcacacacccccctttctgggctcttgagtatttgagtctgcctcattagaactccctgcaaggctttgttccagcaatttcccccatccacagtgcccacttccctcctgtttgccccctagatcttcagggccctggtgaagcctcatgggctccttggagcctcctctatgctaccgtcactctgcgacctcttcttataacacacacctatggccatgcgcctctggaaaaacgctgcttgctcattatgtataccccctcccactctggagacaggaggagcaatgccagtagccaccgcttaattacctaacaaatgccacatgtgccctacatgttttaaaatttaatgttcccaacaatcctgtgaggtggggattatcaccctcatcctacagataaggaaaccaaagctagagttaggtgacttgcctgaggtcacagagccaggcaggggcagagctggcccagggccctctttctcagatttagggagttgggggtcagacactgctgccctcaggcatgtgagaagaagcccagaacacttgggtttcatcagccccgaggtgtggccttcctggtcactttgatatcagatattgggcaaggaggtgctcatagacacccttcaacaccccagccctgggctgggccctgggtctgagagctacttgaaagcacgtgggctggtgggggcagggggtggaatccagtctcaccagaacgtctacatgagactctgggcatgatatgggcggaggaggtagctctccattgccaggatgtgttcctgaagtctaggtgtgggctggcttgtttaatggggccagccctcaacagcgtagcattgtagagatgatgagggactgggagcctgaataccctccttaagtcctggctgccacaccctgacctcaagcaagtgattttgcctctttaggcttcacctcacgtcaatttccttctctgtgaaacgggattgccagttctccccttgcctatcttcccagagagtgctgtgggacggtgaagccccacataggcgcgggagaaggggattgctttccgggtggtaaaagagctgctccgggcctcgctggcagctctacttcctgtgccttccccaaagataggagcaagtgtgtaaagcaagtgctgcctgggagcagctatttgagtcgtctattgggaatcttcccctacagcctgtctcatgtccccccatgaaacagagacgtctgtaggtagcagggttgtgttcccttcataggtggagaaacttgtacctaggaagggcaaaagacgctcatcccccatctctggggtcagtcctcagtgatggggctggcttggcctcctgccagacagtccagtctaacttgggcatccaggcctatagttgcctctgaggctgctctggatttgcttatggatttgctcagctatgcagtaaacctctatggctcctcttaccacagatgaatcaggtaccaagtcctggcacccatgagtcactggcagtgggatggccaaataaagtgacattggtgctgtgctgtgggagtgtgcagagagagtgcaggtgtggtgaggggcagattggctggatgctgaggctccttggcagccccacccaggagtcaggaacagtcaggttgggtgtgaagatggtggcatgcggtggcatctgattgcagcatcggcatccccaccagcttctgctggactcctcccagccacagctggggcagaggaagtactgacagccaggtggcaaggactggcagtgttttgcgggtgcccaactgaaccctcacttccatctgtgtgagcaatggtaccagaactatggcaagcaggtaagctccaggtcccaaataccctgctaggtccttaggagggtggatgccggagatcacaaacttcaccctccttacccccgtttcacagatgaggaaactgaagcccagagaggtgaggagacttagcatggtagttggtggcagagctgggactagaaccccaagtcctgctgccactttacctgctgtagaagatgcgtgctcctgacccacccctctgaaggaaaacagatcatccatttctccccttcccctcccagctccccaccactgccccctgctttgttttggggagcagagagaaggaacttggggacacacagcatcggagcagacgcaggcctggaggttgggcctgaattgagttcagctctgccagcccctggctgagtgaccttgacccagtatcaccatcaaaatagggccaaactcacaggagtccaagtgcctgtgcaagggcatggagggtcccaaagctttatgggcctcttgtgcatcatacctgtcactcagccctgcctggagggaaccccaggggcctgaagagtggccagagcacccccttggggcgggccctgacagggcattggggatccagatatggatcagacccagacctggcccttgggcagtttccagtgtgatgcagaatcagcttgtaatcagcagttactacaaggccagggactgtaggagccctgaggatgactctcttttgtttctccattgtgccggtctgactttatcttcaaatagattatctccttggccgtcaagatggcccctggtaattccaggcctgcatagaccttagtgtttatcatcccagagaaggaaagtccttctctttccaaaggcttcctggaagactgctgccttatcaccatctctgggttttgaaggatgtgttgctttatctcattatcagagaatcatcaagtgagtaaagcagggaagggcctctgccaagaatatttcttaggtggactgggggctcccactggcccgggattcagcatccatgtccaggccagctcccaggccacggctccatggtcaactaggttgggattgcctgagagggcctgggcctgagaaatgcagagatgcagtcctcccagcttccctctccaggagcctcccaactcttaacccccacggaagcacttgccatttggtatttgggacctagagctcaccaccttgcagcatcccagtacagttgctcaggcagatgggaagtgagggttcacttggtagactgcatttcccacttgttggcagagtgagctgtgggcggtagttggggctggataaggcagggtgagaactgaaccagcagtgtgtgaaaaccctgagctcagacccaccttgctgcagtccctcagtttccagtctgtataatggggtgagggttgaacaagatggtgtgtgtttcctgtgctatgactacctgattttaagacacctaataagcttagcagaggtatttggattaggcacgacgaaaaatttttaggtcttctcagttgtttcagttggggatatgtcatcagtgaaatttctatactcctcctccaagctgcatgggggctggccctggtgccaaggtagggagctagataagctgacatccagtgtgcctcttccctaagcacccctcaaaccactggcttcagggacctgtctgcaacgggaagcagtcagccacgagaaggcatgctttccttttttttcttgctgaatagaaggtggtggcacccagtgctgtgtctcacccctacctgagtgtttggactgaagtatttatggtggtgtttctcagacttaatcacctggggatcttgttaaaatgcagattttgattcagtaaatccagtctggagcccgaggtcctacatttctaacccgctcacaggtgatgctgatgctgctgttcccagaccacactttaagtaggaaagtgctagagtacattttgtcttctctctagccagggcatccagcctgcctcagatggagcaggaactcacctgtcacttaaccagcccccggtggctgtggctcctgcttcgcttcatccagcacgactcaggaggtagagccagctgctggaagatgacttgtccagccccagcccttggatcaagggctcaagcctgtgcttggacttcacttccctcccttatatactcacccaaacctgtccccacttgcaggtgaaggtgaagggttatgagaccctcaaggataagcatgtgatgaactcatctgtccaggccccactgctgggcaggttgatcaggccctgagcatgaccctcccactgtgtcctgtgtacagagcctttgcactcagagctgctctggggaaagggaaggtcctctaagcagggtcaggaatgctgggtttcagtcctggctctgccgcctactgcctgagtagccctgggtcagtcagtgcctgtctctggtccccagtctccctggctgtccaattaggctatactggatgaccccagagggccctcaggctccaggatgggttgctgggcaagtctggaggtgggaaagtcctatgaaggtaggatttttataaagggggtgaaggagcaattatgaggcagacctctggaatggttctatggcccagcctctttatttgtttttgtgagttcacatcctgctgcctgcacctcagttatgcctgtggtgttattagatgctactgaacacccagtttgtgcaccgaggatatggcagtaaaccctgcgagcttgcctggggtcacatagtgagtagaaccaaagtctgaacctaggtttgactcttctgctaaactaagccccttccctctgatgcatcacaccagggaaaggggtcatcttgaggcctagcatttccttccttcctcctaaaagtcaaagcagttgttaactttcagctgataaaatctggcctttcacagagcagatggtatgaaggaatgtttgacgggcacacagtaggtgcttggtgaagatgtgtcgagcaaagggcatgtagtgggggctcagcaaagaggggttcgaggtggcccacttcttcagctgctggaaggaatggggtatgggtgaggaactttcatccatgctcttccccagtgctgtctctcctgcagtcaccaggcttcctgtccccactgcccatcagctgctggagtccagggcgtcatcctaggggcaccaagccaattaagtgagcacatctcgtcctaagttccaggcttggcacttgcttgatagcgagcataattacagccctcagtgtccttcaggctgcctgaagctcactggccactgggccctttggggaagcaaaggctgtcaccttattcctttctgggctccacactttgggcactgagatgaggatgaacatgtacatctctctgaaagtggtagtggtgtggggaatcagtggtgttgggggtgggggcaagagggttcagctccttggagaaggggtattaatctgggacatacagaaggccgagcagggattggggatgctcaaagtacacttggagaaaaaaaacattggaaattggatgttgaacctctgtccttggcctcacagacagatagcaaagtttaaatatttgtactagatccagataaaggacaggagtttgactgaggtggaggggatggaagaaaactggcaattatgagagacttcccaaggcctagcccctggattagcctctttagatacttcatgtggtctccaaaatgaccccctgagtgcgataccattcccattgtgtatctgtagaaaccagggcacaggggagcatgcagacagcctagagttacaaagccatggggtggagggctaagatctgaacctaggtctgtctgattctatagctgatggtcttctcacatctagaaaagttcctgtgggaggtgaggtttgtactggtgaccctgtgactggagggaagggtgacagtggactgacatcttccctctgctgtaggcactggatccagcatcctctccgccctccaggacctcttctccgtcacctggctcaataggtccaaggtggaaaagcagctacaggtcatctcagtgctccagtgggtcctgtccttccttgtactgggtaagctgggccttacagggggggcgggtgggcaggcagagtccattccccaacagaggttagagtaggagccctgctctgcaggggtgagggaataagagtaagtcttacacacgctgccccccccagcacatttccacatctacctttgggtcccagatcaagtgctctacccctcagcatgcatgaggattcagcgagattcggtgggaggtggtgtgatagttcccatttacagatgggaaacctcaagtattagagaaggtaggtaacttgcccaaggtcacacagatttgaatccctgtctataggacccccaaagcctgtgcctttcccacagtgccaccctgcccaccaacagacattttctagcaggtatgttactttgccttaaggtagtttggtgccatgtttaagtactgaatctcctgcaaacaagctctgtgaccttacacagattatttgaactctctgagtgttagtttcctcattttgaatgtgaggaaagtgcttgcttcacatggcttttgtgaggattgaagataagaaatgagagcacctggcgcagggcctggtcatgatgggcccccattacatgggagtcatcaggaggtgccctcagaccccactcctagcccacacccatccttagctgagcatattccccaggtgcttcccgaggcctgctccctgctgtctctcagcacagcccacatcagtgctttggttgctttttctgcaggtctggcaagataccctcactccttaggttgccatccaggccagaggcaggacaatatgattgtctgaggggagggaagaggccccttgtttttccccagacccctgtgctctcagcatagcaggtagcttcctcagcacgtcaaggcagatgaacctgctccagagcatcacagagtgcattctagcacctgtgagccagtccctctgggcgacccactcttcgggactgtataggctggtaggggatcatcaggacttaccatgtcagtgctgagcagctgtccttcagacagatgcatggggtgccctgaaactcagaccatgtttgcagagccaagggatagaacttcacaggtgagaaaatggaaatttgcagaggttcatcaactacctgctaccgtgaagctcattaaatggcagagttgggatttgagcagaaactcagtgcattccccaggaatcccacattactggaagcccagaattagtgaactggggctgaaacagccagtcttcacctttaggcccaagaacgggctttgaggaggggatccatgaacccttaaaattatatgcaagattatatatgacagtatgtgcacatttttctagggagaagggccatactgtcctcaaagtcttacagggacatgcagcctcgagaagccaaacactggttggaagaactgagcaaactaaacaggctcccttaggactcagaccctaacatggcttgcatttggccacttactagaatcccagagtagcgagcacagtgtgaccccttcttactcaaaaaggaagtggaggcctgcttggggtcacatgagaagaaagtactgggaccaggacaagaacccagggactccagcctcccagaccccctgcctagtctgctagaccagctccctttgttccctgttgcacccaaaagccaccactatccctgtcttagtgggtctgggcctggctggtagggagctgagcagcttgtagaacaccagctcacgcagctggtgatggggactggccctaggctgtaggttaataattgatcagacccaaccacagcccagaaaccggcccagcatcttctcaacacccttgcctggcctcgcctcgcataggtgggagcctggcctggttggacaggcagatctcctgagctactgctaattaccaccctcagcagccccagccactccctccctctgcctctcaaacctgctggcagaagctcacctggcaagcaaagaccatggtagccctgttggtctctccctggaccagagatttttcaccactttgtgccatggaaccctctggcattctgatgaggcctatgacctttcttagtgttttagagtatttaatacaaggtgcattggatttcaaaggaaactactgataataaaatataaatatctacacattaaaaaagttgattagacatgtagtaacaggtgcctttttattactgtaaataaaacgatctagtagcaagtgtaaaactgctacaaagttatgtgaaaatacctttgttatttatttgtgtcataaatactgctgataattctgtgatttattacattggtaagtgaaggaaatgccaaatttccataagagataagtgaaaatttagatgtcatttgtttccccattcaagtccatggatattgtgtgtcaggctaagtaagttcaaacatcatgtttaattttcccaataccctgtaaggaaattaagacttaggaatggggcttggccagcaagtggcaggactaaggctctaggcctgtttggtcccagagtccatgctcttcaccaggacacactgctgccttccctgccattgatcatccacagactgccctgcaccacaggccgcagggctccagaattttgtatcacaagtgtctttgcaggcaccatgatgtgcagaaagtgggtgatgtgtgaaagcggtcctgagccttccttgtgtggggcaagcagggccttctaagcttctcatgagctcagcaacagtggtttttactgcagccccatgacctaagagcatggaaccagagcctgttgttcagaggacaaggattaggctctgagaaaggaaggtcatttggtggatttagttcatccttttgctcttcctgtgtttggtttctggggctggagagattaatgtcacctggtttctgctctcaaggagctcaggggctaaagagctgtctgctagagggagtctaatgagggaggcagatgacgaaagggatggtaagtggtttgagagagagttgtgtacacataggggaggggaggaagcccccagctgagaaaggccaggctagaattcagtctctggataccccatcaggcctcttcttctccatccaggctgcctcagcagcagagtaaggacaagttggtagggatacccaccttcccagagagaccagccctctaagcagtggggcctggagctcattacccctctggtcccattacccctcaagagagttagaggtttctggaagctaggtttccagggtgctcagaccatagcctaaacctcatggttcctgtctggcccacctggagcatccacctagaggatgccactagaggagcctggatgcctatggagtctggggggctagagtcatcccttttcaggcctaagaaagggaatcaggcagactgctgaacagtaagtatgactttgtaggcagcttttagacatagctattcaccaagctaccataagcttttcacagtttgcttttaacaggctcttgtaggctgcacatgcttccctagaaacttgtcttcccttctgcgatgtcatactcctaagctggtcctgacaaattggacatctcgtcactctgtgttcactgcccctcccaacaagagagttgtaccctgtttttagctaccctggggagaggctggcttaggagtctagaacagggctagactggggggcaacaaggggctaccatttccctccccataggctcatggagagtctacatccagccttatcttctcccatgggaaaccagaggaggctcagcatggtgagaagagagcatgacatccagagctaggcagcctacagcacctgggaccaccaggggatgggcacacacagcaagggttggcctcccttctggggcagtggaaaaagtcctagaaggaggccatgcttctcccaccaaacatgagtacctgctgcccttgcccttgtgccgaataccaggcaccaaagaagatgcctccccgcccagtgtggggaatttacaggcaagagatgatatgtagatagtatgatattggggaatacttcttgaagagctgaggtctgagataggccttaaaggttgggtaaaaaatggaaagagagaagccctgctgagggcagctagtggcaagccatgaaataaagcaggcatggcacaaactctcctttctttctgtgccaggctaggttagtctcttttatggcctacaggcccagaatatggtgaccaatggaagccagcctccaggcaagtcttccaagtgtgctgttagggttttttttaatacttttttgagatagggattccctctgttgcccaggttgcagtgtagtgacacgatcatggctcaccgcagcttcaaactcctggcttaaggagtcttcccatctcagcctccagagtagctgggactacaggcacatgccaccttgcccagctaatttttaaaatttttttgtagagaaggggtctcgctatgttgcccaggctggtcttgaacttctgagctcaagcagtccaccacctcagcctcccaaagtgctgggattacaggtgtgagccactatgcctggctgctgaggtttttgaagacggggaggctgatgggctctgcgctttgacctgggacttcctggactgccattatgttggaagggagccagccctcctcctgggcaagcatctcctctctggtccctccagtgatggtctgggactctggtgaatttctaaagcctaatgcagagaatggactgtagagtcagacctgtgtttgaatcctggctctgccactgtcctgctgggtgaccttgggcaagttatctcccccttgaacctcagtgtttttatctctaaaatggggcaaagtcaccctgcctcacacttgagacagtggctcagcccaagtcttgagatgcagaggcactgggtatgtgttccctcccctcatccacagtgtctgggctgggtgctggcacgggggcacacacaaggaggggacagtaagaacagcttcacaagaagctgaagcctatctcctttggtgttcctgcacagataacatggagtccatgggcccctcaatgcccggacagtccatcagaatctgggagatgaggctcgtcttgtcccaggaatctgctcctccctgggctgagcattcctgtagctatttctcagggtttgtgggccctatgcccatggccctgggtgtgcctagcttagtgccacagtaaacactcattccatccaccatggccctgaggggagatgaagcccagtaggacatgacctgtgaccatttgcccccgcaggagtggcctgcagtgccatcctcatgtacatattctgcaccgattgctggctcatcgctgtgctctacttcacttggctggtgtttgactggaacacacccaagaagggtaagtgcaaggcctcccttgccccacccctcattctaggtatgctctcccccctgcacaagctgaagggcctcatcctgagtgctgtctcttttaacacccactttgtgaaaagcattggactagtcctttggggggaggttaaaagcccctcagaaggcactgttctggtcctcacgagttcacactcagtcgagggtttgcataacatgagggaatgaatgtgaaaaggggcccgataggaagggggcgaagatgctccatggggtgatggtcacccgcttggatttcacaccagccctgtcctgtctgccttgcccaaatgtacccccacccccactaactctgtattttattccctggaaggtggcaggaggtcacagtgggtccgaaactgggctgtgtggcgctactttcgagactactttcccatccaggtaaagtgctgtgagtgttgtcttttgagggtgggaatgggtgggaaatctgaactcgggccttaacccacccacagggaagcaagtttagaccaagttggtctctgggtttccttcctactgtgtctagctgtgctggggacctcactgctcttctgagtatccatcgtctttgggccagccctgaggtcctgacagggaaatgtggctcagtttggctttcattgtcacctctgtctggtccctgcctggtctgcaagctgggctggtgaggcacagtcatctggccctgatgcatgtgggcgattgggcgatgctggtgaattgaggataactctggcaggatcctgaaggttttccccacaggggaaagacctgtctggctagctcactcaacaccccagccccagcacaccctagttgctgagtctccccgagaaggtaggggtgctgaagagtggaggcagcgtgtgaatgtgaaagtgttctgtgcggggtgcagggtggtgtatatttgctgttgtgagtcagtgactgagatcctggtgtgctgcctgggggcagtggctgggtaaccctgcatccttcactgcattcagtatgttgagggtggcagggccagctccttctgctcatccttagcctaagcccagtcttcccaggaccttactgttcctcagggtcagagttccttctccttttcctgaccccatctctctgactgcagaaaatttgaagctgcttttgttgggagaaagttggatcataggacccaaccctctcattttggaggtaaagaaactgagcaggtaaagatgggcaggacttgtccaggctgcatagtctagtatgatggcaacattgcaaccaccatccaggcttattgaattcgggacccaggttcttttccactgatttcctactgcctgtttctctggagagattcaattcctggatttccccattggactgattccagcttcctgggtctccctctccccctttgctgctggagatctcagtttaaattcctgccctgtcactccattcattgacctgccaccattgctccctgtccagtgcagggctctgctgggcatggggacacaagtcagccctgcccttggggtgagctcactgtctaatgcatcctgatagactttgtcactttctaccatggggccatgggcagactttctcaagcctgctgagcctcatctgcaaaatggagctgtatgatgaaaagtgaaaaaaagctgtatgatgaaaaaaatgaaaagtgatcagttctggttgggtgtgagtgatgatagactgttctctctgctttctctctcacctcaggggccaggctccagtgttctctgttgccactgtggcctggtcctctggaagcctccaggaggccagtagccccatccacttggaacaggatgacctgatgaccgttggtcagaccttggacaggcaggtgtcctttgctatctccacccttccaaaagaaccaaaacaaacccctgtgtccttctcacatctctgttccaagaagtcaactgggagttggagccatagggcacatgcaacctggccctgtgagggctccctggggcactaggacaaaacccaaactgggcctgaggcaggctggggtgttgagcctcaacctggggcttaggctgggccctgcctctgtccctcagggcctcagtctccccttctgtgcagtcaggatttagccatagtgatctgacatcatgcctgacactctgtaggggtgtgtgtgaccctcctgtcccacccccttttcctggcctcttgccagtaatcatgtaatgaagatctgccattgtacccacccacccacctactcccttcctggtgggactctggtctttgccagcagaacagctcatctggcccagaatgtatcccttctgttggcacaggtggggttcatgtgttagcaatagccaccgagaccaccagccacctggaagaggagcagacagtgccccaggtcacctctccccaaggtgtaggcagaatgcttggagaggagactaggaaagactctctctaagcttagaatcacctgtccatctgcctcatttcactgataggcttactgaggcacagagacgagggactatcccaaggtcacaaagcttaagtagtagcaggactagtgtaggaaccaggactgtctgctttgaggcccatggtcttactcctgtgttactttcaccatcactgtgctgtgctgtgtaaacttaagcaagcctttgctcttctgtgggtctgaactttttcctctatgcactgctgtggtgggacaagcctatctgagcacctttcctcttgtgggaggcagggtataaagagtgacttgataggaatgtttcccagactgacattagccagcaggcttggcctgggcatcgtgttgggctaggactttgccactggaaacaggcagcaagaggacacaagagcaggcgtgtcaacagagccttcattggcggtatccttcccctccctccagaacagacattctcttcagccctgcgggaggggagtgtgacatgaaaatagatcagagctggtcagatgcctacattcttttgggtcctacagcaagggcattgacttgcactgtgtcccaaagcacctcattcaaacaaatgtcccatcagagccttgaggagggaggagatgatttaaagagccacctggggcccactgggtgacatgtcttcatccagcagcccagggaaaagtgcagtgactggcctgctgcagacatgcaggataatttgctgtgacctccacaggggaagtgcagttcccttctctaggcctcagcttccctcctgtcatccaaggaatggcttagacctttcagagctctgccagcccatgctgtgttgtgtgttcctggttatcaaggcccgatgggaaggtgggggtagccataggaaggggacaaaaagatgctgcatgccgtgatggtcacctgctggggtaactatcccaggcctggccatcagctcaggagcaagtttccaagtttcccacccggtattggctgccccagctcttccctcaatgcctgcctgcctttttcatcaaaactagcacaaggagcctttttttttttttttttttgagacggagtcttgctctgtcgcccaggctggagtgcagtggccgaatctcagctcactgcaagctccgcctcccgggtttacgccattctcctgcctcagcctgtgaagtagctgggactacattagctgggactacaggcgcccgccacctcgcccagctagttttttttgtattttttagtagagacggggtttcaccatgttagccaggatggtcttgatctcctgaccttgtgatccgcccatcttggcctcccaaagtgctgggattacaggcttgagccaccgtgcccggcccacaaggagctttttaactccagcttcactgagagctaatttggtaggcagacctgcttgttaggaggcgaaacattggaacagcaatcctacagagctcacataaacgagattttgagatctgctcactgtcccaagccccattagccagccatggattagactgctgctgtttcccatttatttggggagtagctgagagttggttgggttttggagcaactttaatctgtttgcctagggcaaaacgggagaaagagcatcagtcccccaagcggtggggatgagagggagtcttgctcacatttgcatagactggcagcgtcagagctgagaatggtgccagccacccttttccatcctctctgtcacctaaagattgggatttcaattttccaaggtcaccaccagcatcctctcccccagagctgcacacaaggtccttcaactctgccaggaggctcccaaatctagagtcacagaaaacctgggctcttgacgttctgctggtggccagtgactctgcttccaggtggcaccagttcagggaaggggcactttgcagcactcaggtgggagtgtcattgatatcacttctcttgaggcagggcagccaaaaagaccaacgtgttcattccttgttatccaggaattgtatttctagaagtttgtttcacaaaaacaatcagatatgtggacaaagataaggtatttattgaagcattacttctaagagggaaattttggaagtttttaaaatgtccatcaaacagggtttgagtcggtgctgttacatgtaggagagctgtgctgtagaatacgaatgcagccacgagaagacatggaactgagggattttgataaggacagatagctatatgtttggtggaaaatgatataaaaatgatatcaacccatataacctcaattttgtggattttgaaaaagagcatgtatatttttgagtagaaaaaggactcagtgagattgtttcatctggatggaaatatgaatttttttaaattttctttttgctttcctatatttgtaaaattctttaggagtttctttattttctttccctctgctttcttttcttctcctttatttccctgtcctttcctttcctttcctttcttttcctttcctttcctttcctccccttttcctttcctttcctttcctttcctttcctttcctttcctttcctttcctttcctttcctttcctttcctttcctttcctttcctttcctttcctttcctttcctttcctttcctttcctccttcctttcttcctttccttctttcctttcttcttactctgtcactcaggcttgactgcagtggctcaatcttggtttactacagcctctgcctcctgggctcaagccatctttccacctcagcctcctgagtagctgggaccacaggtgtgtgccactatgcccagttaatttctgtatttttgtagagatgagggtttcaccatgttgcccaggctggtctcaaactcctgagctgaagcagtcctcccaccttggcctcccaaagtgttgggataataggcatgagccaccatgcctggccctattatttttctaatcagaataaaagtaatgtttttatgagcagaatacccttactcattgtctctctcagcctcctccacccccatcttgttccttgtaacgcagggtaggtgtcacaggctctgcctctcatggcttagggtttagggacactgcatcacccacccctccaagcaccagccccagggcagcgggtgggccctgaggaagccagtcatcgtttggagcagcccagtgcccttagtaccacaggtcaggttctcagctgctacagccttacaactgacctctatcctaggctggctggcacagggctgtcgcttgtccttcctgcctcagaacctgagctgagcccagctgactgtgggaaagtttccatttgagccagccagtgtcccttttccaggccaggggagtaggaggtgggctgcctgtctcattctgtgaactgtggaggagcccacagagcacagggccaagtaaaccttacctccaaggagctcatagtttggagagactgacagtgggggcagagcttgcagccaaggccctggttgccaaactcagaaacttggaccttactcatatgaagccagacaccctttccagtctgagagtgacaagggttggatttgagttttatttttttttttttttttttttttttttttttttttttgagacggagtctcgcgctgtcacccaggctggagtgcagtggccggatctcagctcactgcaagctccgcctcccaggttcacgccattctcctgcctcagcctcccgagtagctgggactacaggcgcccgccaccgcgcccggctagttttttgtattttttagtagagacggggtttcaccgtgttaaccaggatggtctcgatctcccgacctcgtgatccgcccgtctcggcctcccaaagtgctgggattacaggcttgagccaccgcgcccggcctggatttgagttttagaataatcactctggctgtggcgaagaggatgggcccagagggagggaatgccggaggctggcagagtgcaaagaagaactgtgtgcttggctggggactgagaggaacaagggcaaacattacccaccccttcccagagagccatagcgcaaatggtgactgcccaacaccagcactgtagccctggggatgagagtctgaggtcaggtgtggagagtcattgcagcagccctcaggcccatggaggcccaggggaaatgacacatccagtccctccctaccctctgggtatgccctgggatccctctcccagccagtttcctctgacccaaggtcatccttgcagctggtgaagacacacaacctgctgaccaccaggaactatatctttggataccacccccatggcatcatgggcctgggtgccttctgcaacttcagcacagaggccacagaagtgagcaagaagttcccaggcatacggccttacctggctacactggcgggcaacttccgattgcctgtgttgagggagtacctgatgtctggaggtgagaatccaccccctgcttgctcctgctgggcactgttgtcaaggcctgagcctctccatcgagcagggtgacacagggagccaacacaccattccttggtgctgggcctgcattgggagatgcgacctgctgcagacatggtgggtcagggctgaggaggagagctgtccatatggtcttcagaattcaactcggataacaacttccctaggaagccttctttgacccccttttccagggatccccagcccttgtgttgccctctatacaatctgattgttgtccatggcactgtaattgtccatccacctgggacttcccaccagactgatgcattgggatccccaacaccttgcactgacttggcaggattagggcccagggaatgtttgccaaatgcatgagttcccaaaacaaccttgtatcattagctgcattttacagatgaggaaactgaggctcagaaaaatgaatagcttacacagaaccagacaactccaaagggactgggctaggtctggggccaagaccagggttctttgtgttttacacgtgactgtgtgctggggatggggagtggatccatgggcaaccctgactgtgcgtccttccctccccccaggtatctgccctgtcaaccgggacaccatagactatttgctttcaaagaatgggagtggcaatgctatcatcatcgtggtggggggtgcggctgagtctctgagctccatgcctggcaagaatgcagtcaccctgcggaaccgcaagggctttgtgaaactggccctgcgccatgggtgagtacacacccactcactccctccagtgtccctcagcacagggcagcagactccttggcccctgaagacaggacccagaccccaggaaggcatagaagggagtcagtcattctgttggggaggggatgatgttggagcccagactgcacagtgtgggccaagtttgcccatgtgtgtctgggtgggcacagatgcaacctgttgcctgggggcccttgcaggtgggccaagagtccaggcttatatgccggactggaccacctggggccagaatacatcattttgctgggagaccaggaggtcaggaaggagggtggcatggaatgtgactgggggacagcagctcttttctctgtcccctgggggccttacctcaggctttggaagaagaggctgcccttcaggctcagccctgggccagcccctggggacccattcaaattggacccagtccctgccttcagggagcaccaagggtagggaagggtggaggtacagacagtgacaacacagtgtgctgagactgtgacacaatggtgagtccagggctgagagagacctgggttggctgggggacagggagaacttcctggcagaggcaggccctgcaggaggaggtggaaaacaggcattccagagcaggatgctcagccttccctttgcctggggggcccagagctctgtatgctccccagtcactagcagtggggcagaaggcccatcagaacctggtagagaggggtcatgtgaacttgggacactccaggtgattctggtatacccagttggagggggacacttggccagtgtccagggcctctaggctgacagaaactgaagccagtaattagggtatgacagaccctggcctctcccttccagagccgacctggttcccatgtactcctttggagagaatgaagtgtacaagcaggtgatcttcgaggagggctcctggggccgatgggtccagaagaagttccagaaatacattggtttcgccccatgcatcttccatggccgaggcctcttctcctccgacacctgggggctggtgccctactccaagcccatcaccactgttggtaagcccctagcctgctgaccaagggctgtcctgaacacagggtgccacacagctagtcagcagtagagacgggattccagtgcaggccacctggctctgatggccatgcccttagccatgaggactttgaagtgttgggtgctgatgggcttggtcagagagggtagtagtaggggtcggggattgagcctatgtgatgaaccaagctctgtgatgggtaaggaaagaaaatctgcagtctccgggtttgcagcacctactagtctatcagggaagactattacagcaaggactggtgggggaatgtgatgaggatgggcaggtgctctagggagtcctagcggaccccagggaggaggtaactcttgcactgctaactgataggaattatctagcaaaatagaggaagaagagaatttttatcagaaacaatagcctaagtgaagttcagaaacaagattgtgtagtttttttgaagaacagaaagaaaaaccttaatatgactgcagcatagacctgtcagaagagtggaaaacagtgattgcacttggccctcatctgtgttgttttgggtgcatttgggattgtttagaggattctaaagaattacctatagtaggtgtgtgtgtatgtgttaatggatcccccaggagcacatgggcccttggcagtggacttgaggggccaaagctcataaagatcctttgtgctcctaggccatttgtcctgccttgtacttttagatagagacaaagcaacagggaggcagcaggaacatttccatgcacaggtgtggctggggaggggctgagtcctgtgggcaatgtgaaggaatttgctcttcaccttgagaatggagagctaccagagagtgtttgggaggggaagttcagatttgcattttaaaatgatccttggagctgctggatggaagatgggttagaaaaatggaagccacaagaccagcccagaggctgttttggtagccagtggcttggaccaagggagtagcagtggagatggaagagatgtgcatgatctgggaaaaatttcagaaatagcattgacaggacataggaatggattgggtatggagatgcagcaggataagaaaataaagcaacacacagatcataaatgctggtcttctccctcctctcctgcccttaaccacactttttattttttattttttatttttgagacagggtttcattctgtcatccaggctggagtgcagtggcgcgatctcagctcactgtaacctctgcctcccagtctcaagcgatcctcctacctcagcctcctgagtagctggtgcaccaccacgcccagctaagtttttgtatttttttaagtagagacgattttcaccatgttgcccaggctggtcttgaactcatgagctcaagcaatctgcgggtctttgcctcccacagtgctgggattacaggcgtgagccaccatgcctggcctacactttttattttttattttttttattttttatttttttgagacggagtctcgctctgtcgcccagactggagtgcagtggcgcgatctcggctcactgcaagctccgcctcccgggttcacgccattctcctgcctcagcctccggagtagctgggactacaggcgcccgccaccacgcccggctaatttctttttgtatttttagtagagacggggtttcaccgtgttagccaggatggtctcgatctcctgacctcgtgatccgcccgcctcggcctcccaaagtgctgggattacaggcttgagccaccgcgcccggccaaggcctacactttttaaagcatgtcacattcctcacagaatcctcagaaaagccctgtgaggaagaatccccatgtaacagaggaggaaactgagactcagagaggcaggaatggcttgcccagagcagagcaaaagcaaagatgtttacttgatcccctgactgtcatagaccctcctagcagaatgcagtgggttcaaccagtcttgatcccatctgcagcttagcacctgtgtggccttgggtgggtcccttcacatgctcctgggcctcagtcttttcatctgtaataggggacaaccagagatgcagcacataaagcnnnnnnnnnnnnnnnnnnnnccccaagctggagcatccaacccagcaagatatcgacctgtaccacaccatgtacatggaggccctggtgaagctcttcgacaagcacaagaccaagttcggcctcctggagactgaggtcctggaggtgaactgagccaggcttcggggccaactccttggaggaaccagttgcaaattgcttttatgctctgtaaatttggaagcgtcatgggtgtctgtgggttatttaaaagaaattataataattttgctaaaccattacaatgttaggtcttttttaagaaggaaaaagtcagtaattcaagctcttttacttccagtttgccctgttctaggtggtggctaaatctgggcctaatctgggtggctcagctaacctctattcttcccttcctgaagtgacagaggaaactcagtcttggcctggggaagaaggatcgccattagtgacttgggccagttagatgattcactttttgcccctagggatgagaggcaaaagccacttctcatacaagcccctctattgccactaccccacacttgtctagtcctgaaactgcaggaccagtttctctgccaaggggaggagttggagagcacggttgacctgttgtgtgaggacagtagtaggcatctggaatgctcctgtttgatctcccttctgtcacccactcctcacccccagtcactcacatcagagcctggactggcctccaggatgaggatgggggtggcaatgacaccgtgcaggggaaaggactgccccccatgcaccattgcagagaggatgccgccaccatgagctaggtggagtaactggtttttcttgggtggctgatgacatggatgcagcacagactcagccttggcctggagcacatacttgctggtggcctcagtttaccttccccacatcacagattctggatgtgaggaagaggtccctcttcagaaggggcctggccttctgagcagcagattagttccaaagcaggtggcccccgaacccaagcctcacttttctgtgccttcctgagggggttgggccagggaggaaacccaaccctctcctgtgtattctgttatctcttgatgagatcatagcaccatgtcagacttttgtatatgcctagaaaataaatgaaagtgagaatcctctatgagttattgctggggctgcatctgcatctgctgctgacacctgggggagactggggccccagctggctgccctctgagccctctagccccttgcacctttggcccacatgacactgctgtggtgtgttagttacctatcactgtgtaacaaactactttagagctcaatggtttccagcagcatctgttgtctcccagttccaagtcacgatttgaggcttggcttggtcctccactcagggtttctcacagggctgcagtcgtcttggagccaggctgaggaaggatccactcccaagcccattcctgcagttgtttgcaggattgacttcctcactggctgttgacagaggccactctcagttccttgccacatgggcctttccatggggtagctcatggcacaacagctgacttagcaagatgagccagtgagtggagtgaagtgtgtgagcaagacagaagtcccaggcccttacaacctaacctgggaagtgatatcctgtcacctttgccatattctgttcattaaatgaacattgctaggtccagctcccactggaggggaggggattacaccagggaatggatgccagggggcaggggtcattgggagccacttcacatggtgcctaccacatgtggtaaagggctcctgtccagctggagggcccttcagtggctgagctggaaggctccttatgggtcactcaagctgtgttccctgccaaaaaggcagaggcccggcctgctgtcaccctagtgatttcaagatgccacctcttttctaattcctttctgttcagtgaatactaggcacctgggaacccttcccagccgagaccaaaggacctcgttctaacttccttactgccagaactgtcctgcctgtccttgctgttcatccccctcaggtccaactcctctgtgctggaaactgagagagctacttgggagcagagacaaacactgagaacagctgaggatacacagggtagtcagagctgtgccagaagtcccaacctgcccgggggtgcctcatgaggaaagaacgcctgagctgggccttgaagggcggctgggagtcaccaggaaaggaag

SEQ ID NO: 4 - DNA, 17 bp, synthetic construct
  source 1..17: mol_type = other DNA
ggcctcccggagactga

SEQ ID NO: 5 - DNA, 22 bp, synthetic construct
  source 1..22: mol_type = other DNA
aagtgatttgcagctggttcct

SEQ ID NO: 6 - DNA, 24 bp, synthetic construct
  source 1..24: mol_type = other DNA
aggtgaactgagccagccttcggg

SEQ ID NO: 7 - DNA, 18 bp, synthetic construct
  source 1..18: mol_type = other DNA
aactggccctgcgtcatg

SEQ ID NO: 8 - DNA, 26 bp, synthetic construct
  source 1..26: mol_type = other DNA
cttgtacacttcattctctccaaagg

SEQ ID NO: 9 - DNA, 14 bp, synthetic construct
  source 1..14: mol_type = other DNA
ctgacctggttccc

SEQ ID NO: 10 - DNA, 19 bp, synthetic construct
  source 1..19: mol_type = other DNA
actgggcgggcttcatatt

SEQ ID NO: 11 - DNA, 18 bp, synthetic construct
  source 1..18: mol_type = other DNA
cccggagtaggcggctat

SEQ ID NO: 12 - DNA, 14 bp, synthetic construct
  source 1..14: mol_type = other DNA
agccatgaagaccc

SEQ ID NO: 13 - DNA, 18 bp, synthetic construct
  source 1..18: mol_type = other DNA
ccgcaagggctttgtgaa

SEQ ID NO: 14 - DNA, 23 bp, synthetic construct
  source 1..23: mol_type = other DNA
ttctctccaaaggagtacatggg

SEQ ID NO: 15 - DNA, 19 bp, synthetic construct
  source 1..19: mol_type = other DNA
cctgcgccatggagccgac

SEQ ID NO: 16 - DNA, 20 bp, synthetic construct
  source 1..20: mol_type = other DNA
tggatgggaaagtagtctcg

SEQ ID NO: 17 - DNA, 20 bp, synthetic construct
  source 1..20: mol_type = other DNA
ccagctggatgggaaagtag

SEQ ID NO: 18 - DNA, 20 bp, synthetic construct
  source 1..20: mol_type = other DNA
cttcaccagctggatgggaa

SEQ ID NO: 19 - DNA, 20 bp, synthetic construct
  source 1..20: mol_type = other DNA
tgtgtcttcaccagctggat

SEQ ID NO: 20 - DNA, 20 bp, synthetic construct
  source 1..20: mol_type = other DNA
ggttgtgtgtcttcaccagc

SEQ ID NO: 21 - DNA, 20 bp, synthetic construct
  source 1..20: mol_type = other DNA
cagcaggttgtgtgtcttca

SEQ ID NO: 22 - DNA, 20 bp, synthetic construct
  source 1..20: mol_type = other DNA
gtggtcagcaggttgtgtgt

SEQ ID NO: 23 - DNA, 20 bp, synthetic construct
  source 1..20: mol_type = other DNA
tcctggtggtcagcaggttg

SEQ ID NO: 24 - DNA, 20 bp, synthetic construct
  source 1..20: mol_type = other DNA
atagttcctggtggtcagca

SEQ ID NO: 25 - DNA, 20 bp, synthetic construct
  source 1..20: mol_type = other DNA
aagatatagttcctggtggt

SEQ ID NO: 26 - DNA, 20 bp, synthetic construct
  source 1..20: mol_type = other DNA
atccaaagatatagttcctg

SEQ ID NO: 27 - DNA, 20 bp, synthetic construct
  source 1..20: mol_type = other DNA
aaggcacccaggcccatgat

SEQ ID NO: 28 - DNA, 20 bp, synthetic construct
  source 1..20: mol_type = other DNA
cctccagacatcaggtactc

SEQ ID NO: 29 - DNA, 20 bp, synthetic construct
  source 1..20: mol_type = other DNA
ttgccaggcatggagctcag

SEQ ID NO: 30 - DNA, 20 bp, synthetic construct
  source 1..20: mol_type = other DNA
tggacccatcggccccagga

SEQ ID NO: 31 - DNA, 20 bp, synthetic construct
  source 1..20: mol_type = other DNA
tcttctggacccatcggccc

SEQ ID NO: 32 - DNA, 20 bp, synthetic construct
  source 1..20: mol_type = other DNA
tcttcaccagctggatggga

SEQ ID NO: 33 - DNA, 20 bp, synthetic construct
  source 1..20: mol_type = other DNA
ggtggtcagcaggttgtgtg

SEQ ID NO: 34 - DNA, 20 bp, synthetic construct
  source 1..20: mol_type = other DNA
tatccaaagatatagttcct

SEQ ID NO: 35 - DNA, 20 bp, synthetic construct
  source 1..20: mol_type = other DNA
caccagctggatgggaaagt

SEQ ID NO: 36 - DNA, 20 bp, synthetic construct
  source 1..20: mol_type = other DNA
gtgtgtcttcaccagctgga

SEQ ID NO: 37 - DNA, 20 bp, synthetic construct
  source 1..20: mol_type = other DNA
agaaggcacccaggcccatg

SEQ ID NO: 38 - DNA, 20 bp, synthetic construct
  source 1..20: mol_type = other DNA
cgcaggaccccggagtaggc

SEQ ID NO: 39 - DNA, 20 bp, synthetic construct
  source 1..20: mol_type = other DNA
aggttgtgtgtcttcaccag

SEQ ID NO: 40 - DNA, 20 bp, synthetic construct
  source 1..20: mol_type = other DNA
tcagcaggttgtgtgtcttc

SEQ ID NO: 41 - DNA, 20 bp, synthetic construct
  source 1..20: mol_type = other DNA
ttcctggtggtcagcaggtt

SEQ ID NO: 42 - DNA, 20 bp, synthetic construct
  source 1..20: mol_type = other DNA
tatagttcctggtggtcagc

SEQ ID NO: 43 - DNA, 20 bp, synthetic construct
  source 1..20: mol_type = other DNA
aaagatatagttcctggtgg

SEQ ID NO: 44 - DNA, 20 bp, synthetic construct
  source 1..20: mol_type = other DNA
gaaggcacccaggcccatga

SEQ ID NO: 45 - DNA, 20 bp, synthetic construct
  source 1..20: mol_type = other DNA
cttgccaggcatggagctca

SEQ ID NO: 46 - DNA, 20 bp, synthetic construct
  source 1..20: mol_type = other DNA
ttgtgtgtcttcaccagctg

SEQ ID NO: 47 - DNA, 20 bp, synthetic construct
  source 1..20: mol_type = other DNA
gcaggttgtgtgtcttcacc

SEQ ID NO: 48 - DNA, 20 bp, synthetic construct
  source 1..20: mol_type = other DNA
ggtcagcaggttgtgtgtct

SEQ ID NO: 49 - DNA, 20 bp, synthetic construct
  source 1..20: mol_type = other DNA
gatatagttcctggtggtca

SEQ ID NO: 50 - DNA, 20 bp, synthetic construct
  source 1..20: mol_type = other DNA
ctggatgggaaagtagtctc

SEQ ID NO: 51 - DNA, 20 bp, synthetic construct
  source 1..20: mol_type = other DNA
gctggatgggaaagtagtct

SEQ ID NO: 52 - DNA, 20 bp, synthetic construct
  source 1..20: mol_type = other DNA
agctggatgggaaagtagtc

SEQ ID NO: 53 - DNA, 20 bp, synthetic construct
  source 1..20: mol_type = other DNA
cagctggatgggaaagtagt

SEQ ID NO: 54 - DNA, 20 bp, synthetic construct
  source 1..20: mol_type = other DNA
accagctggatgggaaagta

SEQ ID NO: 55 - DNA, 20 bp, synthetic construct
  source 1..20: mol_type = other DNA
tcaccagctggatgggaaag

SEQ ID NO: 56 - DNA, 20 bp, synthetic construct
  source 1..20: mol_type = other DNA
ttcaccagctggatgggaaa

SEQ ID NO: 57 - DNA, 20 bp, synthetic construct
  source 1..20: mol_type = other DNA
gtcttcaccagctggatggg

SEQ ID NO: 58 - DNA, 20 bp, synthetic construct
  source 1..20: mol_type = other DNA
tgtcttcaccagctggatgg

SEQ ID NO: 59 - DNA, 20 bp, synthetic construct
  source 1..20: mol_type = other DNA
gtgtcttcaccagctggatg

SEQ ID NO: 60 - DNA, 20 bp, synthetic construct
  source 1..20: mol_type = other DNA
tgtgtgtcttcaccagctgg

SEQ ID NO: 61 - DNA, 20 bp, synthetic construct
  source 1..20: mol_type = other DNA
gttgtgtgtcttcaccagct

SEQ ID NO: 62 - DNA, 20 bp, synthetic construct
  source 1..20: mol_type = other DNA
caggttgtgtgtcttcacca

SEQ ID NO: 63 - DNA, 20 bp, synthetic construct
  source 1..20: mol_type = other DNA
agcaggttgtgtgtcttcac

SEQ ID NO: 64 - DNA, 20 bp, synthetic construct
  source 1..20: mol_type = other DNA
gtcagcaggttgtgtgtctt

SEQ ID NO: 65 - DNA, 20 bp, synthetic construct
  source 1..20: mol_type = other DNA
tggtcagcaggttgtgtgtc

SEQ ID NO: 66 - DNA, 20 bp, synthetic construct
  source 1..20: mol_type = other DNA
tggtggtcagcaggttgtgt

SEQ ID NO: 67 - DNA, 20 bp, synthetic construct
  source 1..20: mol_type = other DNA
ctggtggtcagcaggttgtg

SEQ ID NO: 68 - DNA, 20 bp, synthetic construct
  source 1..20: mol_type = other DNA
cctggtggtcagcaggttgt

SEQ ID NO: 69 - DNA, 20 bp, synthetic construct
  source 1..20: mol_type = other DNA
gttcctggtggtcagcaggt

SEQ ID NO: 70 - DNA, 20 bp, synthetic construct
  source 1..20: mol_type = other DNA
agttcctggtggtcagcagg

SEQ ID NO: 71 - DNA, 20 bp, synthetic construct
  source 1..20: mol_type = other DNA
tagttcctggtggtcagcag

SEQ ID NO: 72 - DNA, 20 bp, synthetic construct
  source 1..20: mol_type = other DNA
atatagttcctggtggtcag

SEQ ID NO: 73 - DNA, 20 bp, synthetic construct
  source 1..20: mol_type = other DNA
agatatagttcctggtggtc

SEQ ID NO: 74 - DNA, 20 bp, synthetic construct
  source 1..20: mol_type = other DNA
caaagatatagttcctggtg

SEQ ID NO: 75 - DNA, 20 bp, synthetic construct
  source 1..20: mol_type = other DNA
ccaaagatatagttcctggt

SEQ ID NO: 76 - DNA, 20 bp, synthetic construct
  source 1..20: mol_type = other DNA
tccaaagatatagttcctgg

SEQ ID NO: 77 - DNA, 20 bp, synthetic construct
  source 1..20: mol_type = other DNA
gtatccaaagatatagttcc

SEQ ID NO: 78 - DNA, 20 bp, synthetic construct
  source 1..20: mol_type = other DNA
ggtatccaaagatatagttc

SEQ ID NO: 79 - DNA, 20 bp, synthetic construct
  source 1..20: mol_type = other DNA
tggtatccaaagatatagtt

SEQ ID NO: 80 - DNA, 20 bp, synthetic construct
  source 1..20: mol_type = other DNA
cagaaggcacccaggcccat

SEQ ID NO: 81 - DNA, 20 bp, synthetic construct
  source 1..20: mol_type = other DNA
tcttgccaggcatggagctc

SEQ ID NO: 82 - DNA, 20 bp, synthetic construct
  source 1..20: mol_type = other DNA
ttcttgccaggcatggagct

SEQ ID NO: 83 - DNA, 20 bp, synthetic construct
  source 1..20: mol_type = other DNA
ctggacccatcggccccagg

SEQ ID NO: 84 - DNA, 20 bp, synthetic construct
  source 1..20: mol_type = other DNA
tctggacccatcggccccag

SEQ ID NO: 85 - DNA, 20 bp, synthetic construct
  source 1..20: mol_type = other DNA
ttctggacccatcggcccca

SEQ ID NO: 86 - DNA, 20 bp, synthetic construct
  source 1..20: mol_type = other DNA
cttctggacccatcggcccc

SEQ ID NO: 87 - DNA, 20 bp, synthetic construct
  source 1..20: mol_type = other DNA
ttcttctggacccatcggcc

SEQ ID NO: 88 - DNA, 20 bp, synthetic construct
  source 1..20: mol_type = other DNA
cttcttctggacccatcggc

SEQ ID NO: 89 - DNA, 20 bp, synthetic construct
  source 1..20: mol_type = other DNA
acttcttctggacccatcgg

SEQ ID NO: 90 - DNA, 20 bp, synthetic construct
  source 1..20: mol_type = other DNA
aacttcttctggacccatcg

SEQ ID NO: 91 - DNA, 20 bp, synthetic construct
  source 1..20: mol_type = other DNA
gaacttcttctggacccatc

SEQ ID NO: 92 - DNA, 20 bp, synthetic construct
  source 1..20: mol_type = other DNA
ttctggaacttcttctggac

SEQ ID NO: 93 - DNA, 20 bp, synthetic construct
  source 1..20: mol_type = other DNA
ggcaccagcccccaggtgtc

SEQ ID NO: 94 - DNA, 20 bp, synthetic construct
  source 1..20: mol_type = other DNA
agtagggcaccagcccccag

SEQ ID NO: 95 - DNA, 20 bp, synthetic construct
  source 1..20: mol_type = other DNA
cttggagtagggcaccagcc

SEQ ID NO: 96 - DNA, 20 bp, synthetic construct
  source 1..20: mol_type = other DNA
cagggcctccatgtacatgg

SEQ ID NO: 97 - DNA, 20 bp, synthetic construct
  source 1..20: mol_type = other DNA
ttcaccagggcctccatgta

SEQ ID NO: 98 - DNA, 20 bp, synthetic construct
  source 1..20: mol_type = other DNA
agagcttcaccagggcctcc

SEQ ID NO: 99 - DNA, 20 bp, synthetic construct
  source 1..20: mol_type = other DNA
aacccacagacacccatgac

SEQ ID NO: 100 - DNA, 20 bp, synthetic construct
  source 1..20: mol_type = other DNA
taaataacccacagacaccc

SEQ ID NO: 101 - DNA, 20 bp, synthetic construct
  source 1..20: mol_type = other DNA
tcttttaaataacccacaga

SEQ ID NO: 102 - DNA, 20 bp, synthetic construct
  source 1..20: mol_type = other DNA
ggtgatgggcttggagtagg

SEQ ID NO: 103 - DNA, 20 bp, synthetic construct
  source 1..20: mol_type = other DNA
ccagggcctccatgtacatg

SEQ ID NO: 104 - DNA, 20 bp, synthetic construct
  source 1..20: mol_type = other DNA
ggaacttcttctggacccat

SEQ ID NO: 105 - DNA, 20 bp, synthetic construct
  source 1..20: mol_type = other DNA
tggaacttcttctggaccca

SEQ ID NO: 106 - DNA, 20 bp, synthetic construct
  source 1..20: mol_type = other DNA
ctggaacttcttctggaccc

SEQ ID NO: 107 - DNA, 20 bp, synthetic construct
  source 1..20: mol_type = other DNA
tctggaacttcttctggacc

SEQ ID NO: 108 - DNA, 20 bp, synthetic construct
  source 1..20: mol_type = other DNA
gggcaccagcccccaggtgt

SEQ ID NO: 109 - DNA, 20 bp, synthetic construct
  source 1..20: mol_type = other DNA
agggcaccagcccccaggtg

SEQ ID NO: 110 - DNA, 20 bp, synthetic construct
  source 1..20: mol_type = other DNA
tagggcaccagcccccaggt

SEQ ID NO: 111 - DNA, 20 bp, synthetic construct
  source 1..20: mol_type = other DNA
gtagggcaccagcccccagg

SEQ ID NO: 112 - DNA, 20 bp, synthetic construct
  source 1..20: mol_type = other DNA
gagtagggcaccagccccca

SEQ ID NO: 113 - DNA, 20 bp, synthetic construct
  source 1..20: mol_type = other DNA
ggagtagggcaccagccccc

SEQ ID NO: 114 - DNA, 20 bp, synthetic construct
  source 1..20: mol_type = other DNA
tggagtagggcaccagcccc

SEQ ID NO: 115 - DNA, 20 bp, synthetic construct
  source 1..20: mol_type = other DNA
ttggagtagggcaccagccc

SEQ ID NO: 116 - DNA, 20 bp, synthetic construct
  source 1..20: mol_type = other DNA
gcttggagtagggcaccagc

SEQ ID NO: 117 - DNA, 20 bp, synthetic construct
  source 1..20: mol_type = other DNA
ggcttggagtagggcaccag

SEQ ID NO: 118 - DNA, 20 bp, synthetic construct
  source 1..20: mol_type = other DNA
tggtgatgggcttggagtag

SEQ ID NO: 119 - DNA, 20 bp, synthetic construct
  source 1..20: mol_type = other DNA
gtggtgatgggcttggagta

SEQ ID NO: 120 - DNA, 20 bp, synthetic construct
  source 1..20: mol_type = other DNA
accagggcctccatgtacat

SEQ ID NO: 121 - DNA, 20 bp, synthetic construct
  source 1..20: mol_type = other DNA
caccagggcctccatgtaca

SEQ ID NO: 122 - DNA, 20 bp, synthetic construct
  source 1..20: mol_type = other DNA
tcaccagggcctccatgtac

SEQ ID NO: 123 - DNA, 20 bp, synthetic construct
  source 1..20: mol_type = other DNA
cttcaccagggcctccatgt

SEQ ID NO: 124 - DNA, 20 bp, synthetic construct
  source 1..20: mol_type = other DNA
gcttcaccagggcctccatg

SEQ ID NO: 125 - DNA, 20 bp, synthetic construct
  source 1..20: mol_type = other DNA
agcttcaccagggcctccat

SEQ ID NO: 126 - DNA, 20 bp, synthetic construct
  source 1..20: mol_type = other DNA
gagcttcaccagggcctcca

SEQ ID NO: 127 - DNA, 20 bp, synthetic construct
  source 1..20: mol_type = other DNA
aagagcttcaccagggcctc

SEQ ID NO: 128 - DNA, 20 bp, synthetic construct
  source 1..20: mol_type = other DNA
taacccacagacacccatga

SEQ ID NO: 129 - DNA, 20 bp, synthetic construct
  source 1..20: mol_type = other DNA
ataacccacagacacccatg

SEQ ID NO: 130 - DNA, 20 bp, synthetic construct
  source 1..20: mol_type = other DNA
aataacccacagacacccat

SEQ ID NO: 131 - DNA, 20 bp, synthetic construct
  source 1..20: mol_type = other DNA
aaataacccacagacaccca

SEQ ID NO: 132 - DNA, 20 bp, synthetic construct
  source 1..20: mol_type = other DNA
ttaaataacccacagacacc

SEQ ID NO: 133 - DNA, 20 bp, synthetic construct
  source 1..20: mol_type = other DNA
tttaaataacccacagacac

SEQ ID NO: 134 - DNA, 20 bp, synthetic construct
  source 1..20: mol_type = other DNA
ttttaaataacccacagaca

SEQ ID NO: 135 - DNA, 20 bp, synthetic construct
  source 1..20: mol_type = other DNA
cttttaaataacccacagac

SEQ ID NO: 136 - DNA, 20 bp, synthetic construct
  source 1..20: mol_type = other DNA
ttcttttaaataacccacag

SEQ ID NO: 137 - DNA, 20 bp, synthetic construct
  source 1..20: mol_type = other DNA
tttcttttaaataacccaca

SEQ ID NO: 138 - DNA, 20 bp, synthetic construct
  source 1..20: mol_type = other DNA
atttcttttaaataacccac

SEQ ID NO: 139 - DNA, 20 bp, synthetic construct
  source 1..20: mol_type = other DNA
aatttcttttaaataaccca

SEQ ID NO: 140 - DNA, 20 bp, synthetic construct
  source 1..20: mol_type = other DNA
taatttcttttaaataaccc

SEQ ID NO: 141 - DNA, 20 bp, synthetic construct
  source 1..20: mol_type = other DNA
ataatttcttttaaataacc

SEQ ID NO: 142 - DNA, 20 bp, synthetic construct
  source 1..20: mol_type = other DNA
tataatttcttttaaataac

SEQ ID NO: 143 - DNA, 20 bp, synthetic construct
  source 1..20: mol_type = other DNA
ttataatttcttttaaataa

SEQ ID NO: 144 - DNA, 20 bp, synthetic construct
  source 1..20: mol_type = other DNA
gcattgccactcccattctt

SEQ ID NO: 145 - DNA, 20 bp, synthetic construct
  source 1..20: mol_type = other DNA
aggaccccggagtaggcggc

SEQ ID NO: 146 - DNA, 20 bp, synthetic construct
  source 1..20: mol_type = other DNA
gacctattgagccaggtgac

SEQ ID NO: 147 - DNA, 20 bp, synthetic construct
  source 1..20: mol_type = other DNA
gtagctgcttttccaccttg

SEQ ID NO: 148 - DNA, 20 bp, synthetic construct
  source 1..20: mol_type = other DNA
gtgcagaatatgtacatgag

SEQ ID NO: 149 - DNA, 20 bp, synthetic construct
  source 1..20: mol_type = other DNA
tgcagaaggcacccaggccc

SEQ ID NO: 150 - DNA, 20 bp, synthetic construct
  source 1..20: mol_type = other DNA
agctcagagactcagccgca

SEQ ID NO: 151 - DNA, 20 bp, synthetic construct
  source 1..20: mol_type = other DNA
tggtcttgtgcttgtcgaag

SEQ ID NO: 152 - DNA, 20 bp, synthetic construct
  source 1..20: mol_type = other DNA
agctgcttttccaccttgga

SEQ ID NO: 153 - DNA, 20 bp, synthetic construct
  source 1..20: mol_type = other DNA
tggagctcagagactcagcc

SEQ ID NO: 154 - DNA, 20 bp, synthetic construct
  source 1..20: mol_type = other DNA
gctgcatccatgtcatcagc

SEQ ID NO: 155 - DNA, 20 bp, synthetic construct
  source 1..20: mol_type = other DNA
aggaaggacaggacccactg

SEQ ID NO: 156 - DNA, 20 bp, synthetic construct
  source 1..20: mol_type = other DNA
atgagggtcttcatggctga

SEQ ID NO: 157 - DNA, 20 bp, synthetic construct
  source 1..20: mol_type = other DNA
gagtaggcggctatgagggt

SEQ ID NO: 158 - DNA, 20 bp, synthetic construct
  source 1..20: mol_type = other DNA
ccggagtaggcggctatgag

SEQ ID NO: 159 - DNA, 20 bp, synthetic construct
  source 1..20: mol_type = other DNA
accccggagtaggcggctat

SEQ ID NO: 160 - DNA, 20 bp, synthetic construct
  source 1..20: mol_type = other DNA
ggtcagcctcggcctgacgc

SEQ ID NO: 161 - DNA, 20 bp, synthetic construct
  source 1..20: mol_type = other DNA
tccggtcagcctcggcctga

SEQ ID NO: 162 - DNA, 20 bp, synthetic construct
  source 1..20: mol_type = other DNA
ggctccggtcagcctcggcc

SEQ ID NO: 163 - DNA, 20 bp, synthetic construct
  source 1..20: mol_type = other DNA
caggtcctccgtgagagcgc

SEQ ID NO: 164 - DNA, 20 bp, synthetic construct
  source 1..20: mol_type = other DNA
cgacagcgcaggtcctccgt

SEQ ID NO: 165 - DNA, 20 bp, synthetic construct
  source 1..20: mol_type = other DNA
cccctcgcgcgacagcgcag

SEQ ID NO: 166 - DNA, 20 bp, synthetic construct
  source 1..20: mol_type = other DNA
tcccagacccctcgcgcgac

SEQ ID NO: 167 - DNA, 20 bp, synthetic construct
  source 1..20: mol_type = other DNA
cccatctcccagacccctcg

SEQ ID NO: 168 - DNA, 20 bp, synthetic construct
  source 1..20: mol_type = other DNA
cagtgccccatctcccagac

SEQ ID NO: 169 - DNA, 20 bp, synthetic construct
  source 1..20: mol_type = other DNA
atccagtgccccatctccca

SEQ ID NO: 170 - DNA, 20 bp, synthetic construct
  source 1..20: mol_type = other DNA
tgctggatccagtgccccat

SEQ ID NO: 171 - DNA, 20 bp, synthetic construct
  source 1..20: mol_type = other DNA
ggatgctggatccagtgccc

SEQ ID NO: 172 - DNA, 20 bp, synthetic construct
  source 1..20: mol_type = other DNA
agaggatgctggatccagtg

SEQ ID NO: 173 - DNA, 20 bp, synthetic construct
  source 1..20: mol_type = other DNA
cggagaggatgctggatcca

SEQ ID NO: 174 - DNA, 20 bp, synthetic construct
  source 1..20: mol_type = other DNA
gtcctggagggcggagagga

SEQ ID NO: 175 - DNA, 20 bp, synthetic construct
  source 1..20: mol_type = other DNA
gagaagaggtcctggagggc

SEQ ID NO: 176 - DNA, 20 bp, synthetic construct
  source 1..20: mol_type = other DNA
cctgtagctgcttttccacc

SEQ ID NO: 177 - DNA, 20 bp, synthetic construct
  source 1..20: mol_type = other DNA
tgacctgtagctgcttttcc

SEQ ID NO: 178 - DNA, 20 bp, synthetic construct
  source 1..20: mol_type = other DNA
gagatgacctgtagctgctt

SEQ ID NO: 179 - DNA, 20 bp, synthetic construct
  source 1..20: mol_type = other DNA
actgagatgacctgtagctg

SEQ ID NO: 180 - DNA, 20 bp, synthetic construct
  source 1..20: mol_type = other DNA
agcactgagatgacctgtag

SEQ ID NO: 181 - DNA, 20 bp, synthetic construct
  source 1..20: mol_type = other DNA
cactggagcactgagatgac

SEQ ID NO: 182 - DNA, 20 bp, synthetic construct
  source 1..20: mol_type = other DNA
aggacccactggagcactga

SEQ ID NO: 183 - DNA, 20 bp, synthetic construct
  source 1..20: mol_type = other DNA
gacaggacccactggagcac

SEQ ID NO: 184 - DNA, 20 bp, synthetic construct
  source 1..20: mol_type = other DNA
actcccagtacaaggaagga

SEQ ID NO: 185 - DNA, 20 bp, synthetic construct
  source 1..20: mol_type = other DNA
gccactcccagtacaaggaa

SEQ ID NO: 186 - DNA, 20 bp, synthetic construct
  source 1..20: mol_type = other DNA
caggccactcccagtacaag

SEQ ID NO: 187 - DNA, 20 bp, synthetic construct
  source 1..20: mol_type = other DNA
ctgcaggccactcccagtac

SEQ ID NO: 188 - DNA, 20 bp, synthetic construct
  source 1..20: mol_type = other DNA
gcactgcaggccactcccag

SEQ ID NO: 189 - DNA, 20 bp, synthetic construct
  source 1..20: mol_type = other DNA
gatggcactgcaggccactc

SEQ ID NO: 190 - DNA, 20 bp, synthetic construct
  source 1..20: mol_type = other DNA
agcacagcgatgagccagca

SEQ ID NO: 191 - DNA, 20 bp, synthetic construct
  source 1..20: mol_type = other DNA
cagccaagtgaagtagagca

SEQ ID NO: 192 - DNA, 20 bp, synthetic construct
  source 1..20: mol_type = other DNA
caccagccaagtgaagtaga

SEQ ID NO: 193 - DNA, 20 bp, synthetic construct
  source 1..20: mol_type = other DNA
aaacaccagccaagtgaagt

SEQ ID NO: 194 - DNA, 20 bp, synthetic construct
  source 1..20: mol_type = other DNA
gtcaaacaccagccaagtga

SEQ ID NO: 195 - DNA, 20 bp, synthetic construct
  source 1..20: mol_type = other DNA
gttccagtcaaacaccagcc

SEQ ID NO: 196 - DNA, 20 bp, synthetic construct
  source 1..20: mol_type = other DNA
tgtgttccagtcaaacacca

SEQ ID NO: 197 - DNA, 20 bp, synthetic construct
  source 1..20: mol_type = other DNA
gggtgtgttccagtcaaaca

SEQ ID NO: 198 - DNA, 20 bp, synthetic construct
  source 1..20: mol_type = other DNA
cttgggtgtgttccagtcaa

SEQ ID NO: 199 - DNA, 20 bp, synthetic construct
  source 1..20: mol_type = other DNA
ctgtgacctcctgccacctt

SEQ ID NO: 200 - DNA, 20 bp, synthetic construct
  source 1..20: mol_type = other DNA
ccactgtgacctcctgccac

SEQ ID NO: 201 - DNA, 20 bp, synthetic construct
  source 1..20: mol_type = other DNA
gacccactgtgacctcctgc

SEQ ID NO: 202 - DNA, 20 bp, synthetic construct
  source 1..20: mol_type = other DNA
ttcggacccactgtgacctc

SEQ ID NO: 203 - DNA, 20 bp, synthetic construct
  source 1..20: mol_type = other DNA
cagtttcggacccactgtga

SEQ ID NO: 204 - DNA, 20 bp, synthetic construct
  source 1..20: mol_type = other DNA
gcccagtttcggacccactg

SEQ ID NO: 205 - DNA, 20 bp, synthetic construct
  source 1..20: mol_type = other DNA
acagcccagtttcggaccca

SEQ ID NO: 206 - DNA, 20 bp, synthetic construct
  source 1..20: mol_type = other DNA
cacacagcccagtttcggac

SEQ ID NO: 207 - DNA, 20 bp, synthetic construct
  source 1..20: mol_type = other DNA
gcgccacacagcccagtttc

SEQ ID NO: 208 - DNA, 20 bp, synthetic construct
  source 1..20: mol_type = other DNA
agtagtctcgaaagtagcgc

SEQ ID NO: 209 - DNA, 20 bp, synthetic construct
  source 1..20: mol_type = other DNA
gaaagtagtctcgaaagtag

SEQ ID NO: 210 - DNA, 20 bp, synthetic construct
  source 1..20: mol_type = other DNA
atgggaaagtagtctcgaaa

SEQ ID NO: 211 - DNA, 20 bp, synthetic construct
  source 1..20: mol_type = other DNA
ttctgtggcctctgtgctga

SEQ ID NO: 212 - DNA, 20 bp, synthetic construct
  source 1..20: mol_type = other DNA
cacttctgtggcctctgtgc

SEQ ID NO: 213 - DNA, 20 bp, synthetic construct
  source 1..20: mol_type = other DNA
gctcacttctgtggcctctg

SEQ ID NO: 214 - DNA, 20 bp, synthetic construct
  source 1..20: mol_type = other DNA
cttgctcacttctgtggcct

SEQ ID NO: 215 - DNA, 20 bp, synthetic construct
  source 1..20: mol_type = other DNA
cttcttgctcacttctgtgg

SEQ ID NO: 216 - DNA, 20 bp, synthetic construct
  source 1..20: mol_type = other DNA
tgggaacttcttgctcactt

SEQ ID NO: 217 - DNA, 20 bp, synthetic construct
  source 1..20: mol_type = other DNA
gcctgggaacttcttgctca

SEQ ID NO: 218 - DNA, 20 bp, synthetic construct
  source 1..20: mol_type = other DNA
tatgcctgggaacttcttgc

SEQ ID NO: 219 - DNA, 20 bp, synthetic construct
  source 1..20: mol_type = other DNA
gccgtatgcctgggaacttc

SEQ ID NO: 220 - DNA, 20 bp, synthetic construct
  source 1..20: mol_type = other DNA
aaggccgtatgcctgggaac

SEQ ID NO: 221 - DNA, 20 bp, synthetic construct
  source 1..20: mol_type = other DNA
ggtaaggccgtatgcctggg

SEQ ID NO: 222 - DNA, 20 bp, synthetic construct
  source 1..20: mol_type = other DNA
ttgcggttccgcagggtgac

SEQ ID NO: 223 - DNA, 20 bp, synthetic construct
  source 1..20: mol_type = other DNA
acccatcggccccaggagcc

SEQ ID NO: 224 - DNA, 20 bp, synthetic construct
  source 1..20: mol_type = other DNA
ccatgtacatggtgtggtac

SEQ ID NO: 225 - DNA, 20 bp, synthetic construct
  source 1..20: mol_type = other DNA
ccaggtaaggccgtatgcct

SEQ ID NO: 226 - DNA, 20 bp, synthetic construct
  source 1..20: mol_type = other DNA
tagccaggtaaggccgtatg

SEQ ID NO: 227 - DNA, 20 bp, synthetic construct
  source 1..20: mol_type = other DNA
gtgtagccaggtaaggccgt

SEQ ID NO: 228 - DNA, 20 bp, synthetic construct
  source 1..20: mol_type = other DNA
gccagtgtagccaggtaagg

SEQ ID NO: 229 - DNA, 20 bp, synthetic construct
  source 1..20: mol_type = other DNA
gtactccctcaacacaggca

SEQ ID NO: 230 - DNA, 20 bp, synthetic construct
  source 1..20: mol_type = other DNA
caggtactccctcaacacag

SEQ ID NO: 231 - DNA, 20 bp, synthetic construct
  source 1..20: mol_type = other DNA
catcaggtactccctcaaca

SEQ ID NO: 232 - DNA, 20 bp, synthetic construct
  source 1..20: mol_type = other DNA
agacatcaggtactccctca

SEQ ID NO: 233 - DNA, 20 bp, synthetic construct
  source 1..20: mol_type = other DNA
atacctccagacatcaggta

SEQ ID NO: 234 - DNA, 20 bp, synthetic construct
  source 1..20: mol_type = other DNA
cagatacctccagacatcag

SEQ ID NO: 235 - DNA, 20 bp, synthetic construct
  source 1..20: mol_type = other DNA
acagggcagatacctccaga

SEQ ID NO: 236 - DNA, 20 bp, synthetic construct
  source 1..20: mol_type = other DNA
aatagtctatggtgtcccgg

SEQ ID NO: 237 - DNA, 20 bp, synthetic construct
  source 1..20: mol_type = other DNA
gcaaatagtctatggtgtcc

SEQ ID NO: 238 - DNA, 20 bp, synthetic construct
  source 1..20: mol_type = other DNA
aaagcaaatagtctatggtg

SEQ ID NO: 239 - DNA, 20 bp, synthetic construct
  source 1..20: mol_type = other DNA
ttgaaagcaaatagtctatg

SEQ ID NO: 240 - DNA, 20 bp, synthetic construct
  source 1..20: mol_type = other DNA
tctttgaaagcaaatagtct

SEQ ID NO: 241 - DNA, 20 bp, synthetic construct
  source 1..20: mol_type = other DNA
cattctttgaaagcaaatag

SEQ ID NO: 242 - DNA, 20 bp, synthetic construct
  source 1..20: mol_type = other DNA
tcccattctttgaaagcaaa

SEQ ID NO: 243 - DNA, 20 bp, synthetic construct
  source 1..20: mol_type = other DNA
ccactcccattctttgaaag

SEQ ID NO: 244 - DNA, 20 bp, synthetic construct
  source 1..20: mol_type = other DNA
ttgccactcccattctttga

SEQ ID NO: 245 - DNA, 20 bp, synthetic construct
  source 1..20: mol_type = other DNA
tcagagactcagccgcaccc

SEQ ID NO: 246 - DNA, 20 bp, synthetic construct
  source 1..20: mol_type = other DNA
aggcatggagctcagagact

SEQ ID NO: 247 - DNA, 20 bp, synthetic construct
  source 1..20: mol_type = other DNA
gactgcattcttgccaggca

SEQ ID NO: 248 - DNA, 20 bp, synthetic construct
  source 1..20: mol_type = other DNA
ggtgactgcattcttgccag

SEQ ID NO: 249 - DNA, 20 bp, synthetic construct
  source 1..20: mol_type = other DNA
tccgcagggtgactgcattc

SEQ ID NO: 250 - DNA, 20 bp, synthetic construct
  source 1..20: mol_type = other DNA
cccttgcggttccgcagggt

SEQ ID NO: 251 - DNA, 20 bp, synthetic construct
  source 1..20: mol_type = other DNA
aagcccttgcggttccgcag

SEQ ID NO: 252 - DNA, 20 bp, synthetic construct
  source 1..20: mol_type = other DNA
acaaagcccttgcggttccg

SEQ ID NO: 253 - DNA, 20 bp, synthetic construct
  source 1..20: mol_type = other DNA
agtttcacaaagcccttgcg

SEQ ID NO: 254 - DNA, 20 bp, synthetic construct
  source 1..20: mol_type = other DNA
gccagtttcacaaagccctt

SEQ ID NO: 255 - DNA, 20 bp, synthetic construct
  source 1..20: mol_type = other DNA
agggccagtttcacaaagcc

SEQ ID NO: 256 - DNA, 20 bp, synthetic construct
  source 1..20: mol_type = other DNA
cgcagggccagtttcacaaa

SEQ ID NO: 257 - DNA, 20 bp, synthetic construct
  source 1..20: mol_type = other DNA
tcattctctccaaaggagta

SEQ ID NO: 258 - DNA, 20 bp, synthetic construct
  source 1..20: mol_type = other DNA
acttcattctctccaaagga

SEQ ID NO: 259 - DNA, 20 bp, synthetic construct
  source 1..20: mol_type = other DNA
gtacacttcattctctccaa

SEQ ID NO: 260 - DNA, 20 bp, synthetic construct
  source 1..20: mol_type = other DNA
ctgcttgtacacttcattct

SEQ ID NO: 261 - DNA, 20 bp, synthetic construct
  source 1..20: mol_type = other DNA
tcacctgcttgtacacttca

SEQ ID NO: 262 - DNA, 20 bp, synthetic construct
  source 1..20: mol_type = other DNA
cgaagatcacctgcttgtac

SEQ ID NO: 263 - DNA, 20 bp, synthetic construct
  source 1..20: mol_type = other DNA
cctcgaagatcacctgcttg

SEQ ID NO: 264 - DNA, 20 bp, synthetic construct
  source 1..20: mol_type = other DNA
cctcctcgaagatcacctgc

SEQ ID NO: 265 - DNA, 20 bp, synthetic construct
  source 1..20: mol_type = other DNA
agccctcctcgaagatcacc

SEQ ID NO: 266 - DNA, 20 bp, synthetic construct
  source 1..20: mol_type = other DNA
aggagccctcctcgaagatc

SEQ ID NO: 267 - DNA, 20 bp, synthetic construct
  source 1..20: mol_type = other DNA
cccaggagccctcctcgaag

SEQ ID NO: 268 - DNA, 20 bp, synthetic construct
  source 1..20: mol_type = other DNA
ggccccaggagccctcctcg

SEQ ID NO: 269 - DNA, 20 bp, synthetic construct
  source 1..20: mol_type = other DNA
tatttctggaacttcttctg

SEQ ID NO: 270 - DNA, 20 bp, synthetic construct
  source 1..20: mol_type = other DNA
atgtatttctggaacttctt

SEQ ID NO: 271 - DNA, 20 bp, synthetic construct
  source 1..20: mol_type = other DNA
gggcgaaaccaatgtatttc

SEQ ID NO: 272 - DNA, 20 bp, synthetic construct
  source 1..20: mol_type = other DNA
tcggaggagaagaggcctcg

SEQ ID NO: 273 - DNA, 20 bp, synthetic construct
  source 1..20: mol_type = other DNA
gtgtcggaggagaagaggcc

SEQ ID NO: 274 - DNA, 20 bp, synthetic construct
  source 1..20: mol_type = other DNA
ccaggtgtcggaggagaaga

SEQ ID NO: 275 - DNA, 20 bp, synthetic construct
  source 1..20: mol_type = other DNA
ccagcccccaggtgtcggag

SEQ ID NO: 276 - DNA, 20 bp, synthetic construct
  source 1..20: mol_type = other DNA
acagtggtgatgggcttgga

SEQ ID NO: 277 - DNA, 20 bp, synthetic construct
  source 1..20: mol_type = other DNA
ggatggtgatgggctctccc

SEQ ID NO: 278 - DNA, 20 bp, synthetic construct
  source 1..20: mol_type = other DNA
gcctccatgtacatggtgtg

SEQ ID NO: 279 - DNA, 20 bp, synthetic construct
  source 1..20: mol_type = other DNA
tcttgtgcttgtcgaagagc

SEQ ID NO: 280 - DNA, 20 bp, synthetic construct
  source 1..20: mol_type = other DNA
cctccaggacctcagtctcc

SEQ ID NO: 281 - DNA, 20 bp, synthetic construct
  source 1..20: mol_type = other DNA
ttcacctccaggacctcagt

SEQ ID NO: 282 - DNA, 20 bp, synthetic construct
  source 1..20: mol_type = other DNA
tcagttcacctccaggacct

SEQ ID NO: 283 - DNA, 20 bp, synthetic construct
  source 1..20: mol_type = other DNA
ctggctcagttcacctccag

SEQ ID NO: 284 - DNA, 20 bp, synthetic construct
  source 1..20: mol_type = other DNA
tgtaatggtttagcaaaatt

SEQ ID NO: 285 - DNA, 20 bp, synthetic construct
  source 1..20: mol_type = other DNA
ttaaaaaagacctaacattg

SEQ ID NO: 286 - DNA, 20 bp, synthetic construct
  source 1..20: mol_type = other DNA
cttcttaaaaaagacctaac

SEQ ID NO: 287 - DNA, 20 bp, synthetic construct
  source 1..20: mol_type = other DNA
tttccttcttaaaaaagacc

SEQ ID NO: 288 - DNA, 20 bp, synthetic construct
  source 1..20: mol_type = other DNA
actttttccttcttaaaaaa

SEQ ID NO: 289 - DNA, 20 bp, synthetic construct
  source 1..20: mol_type = other DNA
tactgactttttccttctta

SEQ ID NO: 290 - DNA, 20 bp, synthetic construct
  source 1..20: mol_type = other DNA
ccaccacctagaacagggca

SEQ ID NO: 291 - DNA, 20 bp, synthetic construct
  source 1..20: mol_type = other DNA
aggttagctgagccacccag

SEQ ID NO: 292 - DNA, 20 bp, synthetic construct
  source 1..20: mol_type = other DNA
gtcctgcagtttcaggacta

SEQ ID NO: 293 - DNA, 20 bp, synthetic construct
  source 1..20: mol_type = other DNA
actggtcctgcagtttcagg

SEQ ID NO: 294 - DNA, 20 bp, synthetic construct
  source 1..20: mol_type = other DNA
tccccttggcagagaaactg

SEQ ID NO: 295 - DNA, 20 bp, synthetic construct
  source 1..20: mol_type = other DNA
ctcctccccttggcagagaa

SEQ ID NO: 296 - DNA, 20 bp, synthetic construct
  source 1..20: mol_type = other DNA
ccaactcctccccttggcag

SEQ ID NO: 297 - DNA, 20 bp, synthetic construct
  source 1..20: mol_type = other DNA
ctctccaactcctccccttg

SEQ ID NO: 298 - DNA, 20 bp, synthetic construct
  source 1..20: mol_type = other DNA
gtgctctccaactcctcccc

SEQ ID NO: 299 - DNA, 20 bp, synthetic construct
  source 1..20: mol_type = other DNA
ctggaggccagtccaggctc

SEQ ID NO: 300 - DNA, 20 bp, synthetic construct
  source 1..20: mol_type = other DNA
atcctggaggccagtccagg

SEQ ID NO: 301 - DNA, 20 bp, synthetic construct
  source 1..20: mol_type = other DNA
cccccatcctcatcctggag

SEQ ID NO: 302 - DNA, 20 bp, synthetic construct
  source 1..20: mol_type = other DNA
gccacccccatcctcatcct

SEQ ID NO: 303 - DNA, 20 bp, synthetic construct
  source 1..20: mol_type = other DNA
cattgccacccccatcctca

SEQ ID NO: 304 - DNA, 20 bp, synthetic construct
  source 1..20: mol_type = other DNA
gggcagtcctttcccctgca

SEQ ID NO: 305 - DNA, 20 bp, synthetic construct
  source 1..20: mol_type = other DNA
tagctcatggtggcggcatc

SEQ ID NO: 306 - DNA, 20 bp, synthetic construct
  source 1..20: mol_type = other DNA
tccacctagctcatggtggc

SEQ ID NO: 307 - DNA, 20 bp, synthetic construct
  source 1..20: mol_type = other DNA
ttactccacctagctcatgg

SEQ ID NO: 308 - DNA, 20 bp, synthetic construct
  source 1..20: mol_type = other DNA
aaaaccagttactccaccta

SEQ ID NO: 309 - DNA, 20 bp, synthetic construct
  source 1..20: mol_type = other DNA
agaaaaaccagttactccac

SEQ ID NO: 310 - DNA, 20 bp, synthetic construct
  source 1..20: mol_type = other DNA
tcagccacccaagaaaaacc

SEQ ID NO: 311 - DNA, 20 bp, synthetic construct
  source 1..20: mol_type = other DNA
catgtcatcagccacccaag

SEQ ID NO: 312 - DNA, 20 bp, synthetic construct
  source 1..20: mol_type = other DNA
tgtgctgcatccatgtcatc

SEQ ID NO: 313 - DNA, 20 bp, synthetic construct
  source 1..20: mol_type = other DNA
gagtctgtgctgcatccatg

SEQ ID NO: 314 - DNA, 20 bp, synthetic construct
  source 1..20: mol_type = other DNA
caaggctgagtctgtgctgc

SEQ ID NO: 315 - DNA, 20 bp, synthetic construct
  source 1..20: mol_type = other DNA
ggccaaggctgagtctgtgc

SEQ ID NO: 316 - DNA, 20 bp, synthetic construct
  source 1..20: mol_type = other DNA
ccaggccaaggctgagtctg

SEQ ID NO: 317 - DNA, 20 bp, synthetic construct
  source 1..20: mol_type = other DNA
aaggtaaactgaggccacca

SEQ ID NO: 318 - DNA, 20 bp, synthetic construct
  source 1..20: mol_type = other DNA
gggaaggtaaactgaggcca

SEQ ID NO: 319 - DNA, 20 bp, synthetic construct
  source 1..20: mol_type = other DNA
aggccccttctgaagaggga

SEQ ID NO: 320 - DNA, 20 bp, synthetic construct
  source 1..20: mol_type = other DNA
gccaggccccttctgaagag

SEQ ID NO: 321 - DNA, 20 bp, synthetic construct
  source 1..20: mol_type = other DNA
aaggccaggccccttctgaa

SEQ ID NO: 322 - DNA, 20 bp, synthetic construct
  source 1..20: mol_type = other DNA
tcagaaggccaggccccttc

SEQ ID NO: 323 - DNA, 20 bp, synthetic construct
  source 1..20: mol_type = other DNA
tgctgctcagaaggccaggc

SEQ ID NO: 324 - DNA, 20 bp, synthetic construct
  source 1..20: mol_type = other DNA
taatctgctgctcagaaggc

SEQ ID NO: 325 - DNA, 20 bp, synthetic construct
  source 1..20: mol_type = other DNA
tttggaactaatctgctgct

SEQ ID NO: 326 - DNA, 20 bp, synthetic construct
  source 1..20: mol_type = other DNA
gccacctgctttggaactaa

SEQ ID NO: 327 - DNA, 20 bp, synthetic construct
  source 1..20: mol_type = other DNA
acagaaaagtgaggcttggg

SEQ ID NO: 328 - DNA, 20 bp, synthetic construct
  source 1..20: mol_type = other DNA
ggcacagaaaagtgaggctt

SEQ ID NO: 329 - DNA, 20 bp, synthetic construct
  source 1..20: mol_type = other DNA
gaaggcacagaaaagtgagg

SEQ ID NO: 330 - DNA, 20 bp, synthetic construct
  source 1..20: mol_type = other DNA
caggaaggcacagaaaagtg

SEQ ID NO: 331 - DNA, 20 bp, synthetic construct
  source 1..20: mol_type = other DNA
cctcaggaaggcacagaaaa

SEQ ID NO: 332 - DNA, 20 bp, synthetic construct
  source 1..20: mol_type = other DNA
accccctcaggaaggcacag

SEQ ID NO: 333 - DNA, 20 bp, synthetic construct
  source 1..20: mol_type = other DNA
ggcccaaccccctcaggaag

SEQ ID NO: 334 - DNA, 20 bp, synthetic construct
  source 1..20: mol_type = other DNA
tctcatcaagagataacaga

SEQ ID NO: 335 - DNA, 20 bp, synthetic construct
  source 1..20: mol_type = other DNA
tgatctcatcaagagataac

SEQ ID NO: 336 - DNA, 20 bp, synthetic construct
  source 1..20: mol_type = other DNA
tacaaaagtctgacatggtg

SEQ ID NO: 337 - DNA, 20 bp, synthetic construct
  source 1..20: mol_type = other DNA
atatacaaaagtctgacatg

SEQ ID NO: 338 - DNA, 20 bp, synthetic construct
  source 1..20: mol_type = other DNA
aggcatatacaaaagtctga

SEQ ID NO: 339 - DNA, 20 bp, synthetic construct
  source 1..20: mol_type = other DNA
agcctgccacagggcccttt

SEQ ID NO: 340 - DNA, 20 bp, synthetic construct
  source 1..20: mol_type = other DNA
aggacagggcagacacacct

SEQ ID NO: 341 - DNA, 20 bp, synthetic construct
  source 1..20: mol_type = other DNA
gatttgtacttgaatccagg

SEQ ID NO: 342 - DNA, 20 bp, synthetic construct
  source 1..20: mol_type = other DNA
acacgcagaccaggacagct

SEQ ID NO: 343 - DNA, 20 bp, synthetic construct
  source 1..20: mol_type = other DNA
tttggatagtcgatttacca

SEQ ID NO: 344 - DNA, 20 bp, synthetic construct
  source 1..20: mol_type = other DNA
aagattcataactatatcta

SEQ ID NO: 345 - DNA, 20 bp, synthetic construct
  source 1..20: mol_type = other DNA
aaaaacatgacagccagggt

SEQ ID NO: 346 - DNA, 20 bp, synthetic construct
  source 1..20: mol_type = other DNA
gacttcccttcacagaatcc

SEQ ID NO: 347 - DNA, 20 bp, synthetic construct
  source 1..20: mol_type = other DNA
caggcaggtgtcagagggct

SEQ ID NO: 348 - DNA, 20 bp, synthetic construct
  source 1..20: mol_type = other DNA
tagcctggctttgataaccc

SEQ ID NO: 349 - DNA, 20 bp, synthetic construct
  source 1..20: mol_type = other DNA
cataggccaggaggaagagt

SEQ ID NO: 350 - DNA, 20 bp, synthetic construct
  source 1..20: mol_type = other DNA
ttgcttaaacagataagcac

SEQ ID NO: 351 - DNA, 20 bp, synthetic construct
  source 1..20: mol_type = other DNA
aatgtcacaagttcacaaac

SEQ ID NO: 352 - DNA, 20 bp, synthetic construct
  source 1..20: mol_type = other DNA
ctgacctcagggtgatcaag

SEQ ID NO: 353 - DNA, 20 bp, synthetic construct
  source 1..20: mol_type = other DNA
ccaagcaggagctggacaga

SEQ ID NO: 354 - DNA, 20 bp, synthetic construct
  source 1..20: mol_type = other DNA
tcatttcatagatgaggaga

SEQ ID NO: 355 - DNA, 20 bp, synthetic construct
  source 1..20: mol_type = other DNA
aggagtttgtgtttcccatt

SEQ ID NO: 356 - DNA, 20 bp, synthetic construct
  source 1..20: mol_type = other DNA
ggcagggcttagaatggcta

SEQ ID NO: 357 - DNA, 20 bp, synthetic construct
  source 1..20: mol_type = other DNA
accattttcacaaggagaag

SEQ ID NO: 358 - DNA, 20 bp, synthetic construct
  source 1..20: mol_type = other DNA
ttcaaaaagtagctactgca

SEQ ID NO: 359 - DNA, 20 bp, synthetic construct
  source 1..20: mol_type = other DNA
tccaggaccctggacatgat

SEQ ID NO: 360 - DNA, 20 bp, synthetic construct
  source 1..20: mol_type = other DNA
agagccagcacacagctatg

SEQ ID NO: 361 - DNA, 20 bp, synthetic construct
  source 1..20: mol_type = other DNA
agtctagttggaaaagtaga

SEQ ID NO: 362 - DNA, 20 bp, synthetic construct
  source 1..20: mol_type = other DNA
agatgccacttcatcaaggc

SEQ ID NO: 363 - DNA, 20 bp, synthetic construct
  source 1..20: mol_type = other DNA
gaagtcaggccaagtgccaa

SEQ ID NO: 364 - DNA, 20 bp, synthetic construct
  source 1..20: mol_type = other DNA
tgattcttacctgcaatgag

SEQ ID NO: 365 - DNA, 20 bp, synthetic construct
  source 1..20: mol_type = other DNA
ccaagtaagcctcggtgtcc

SEQ ID NO: 366 - DNA, 20 bp, synthetic construct
  source 1..20: mol_type = other DNA
tgagtagtcaaaggtggctt

SEQ ID NO: 367 - DNA, 20 bp, synthetic construct
  source 1..20: mol_type = other DNA
atgcctgagggcagcagtgt

SEQ ID NO: 368 - DNA, 20 bp, synthetic construct
  source 1..20: mol_type = other DNA
tgaccaggaaggccacacct

SEQ ID NO: 369 - DNA, 20 bp, synthetic construct
  source 1..20: mol_type = other DNA
ggcttcaccgtcccacagca

SEQ ID NO: 370 - DNA, 20 bp, synthetic construct
  source 1..20: mol_type = other DNA
caggacttggtacctgattc

SEQ ID NO: 371 - DNA, 20 bp, synthetic construct
  source 1..20: mol_type = other DNA
tggctgggaggagtccagca

SEQ ID NO: 372 - DNA, 20 bp, synthetic construct
  source 1..20: mol_type = other DNA
gggtcaaggtcactcagcca

SEQ ID NO: 373 - DNA, 20 bp, synthetic construct
  source 1..20: mol_type = other DNA
tatttgaagataaagtcaga

SEQ ID NO: 374 - DNA, 20 bp, synthetic construct
  source 1..20: mol_type = other DNA
gggatgataaacactaaggt

SEQ ID NO: 375 - DNA, 20 bp, synthetic construct
  source 1..20: mol_type = other DNA
acccagagatggtgataagg

SEQ ID NO: 376 - DNA, 20 bp, synthetic construct
  source 1..20: mol_type = other DNA
aagtgaaccctcacttccca

SEQ ID NO: 377 - DNA, 20 bp, synthetic construct
  source 1..20: mol_type = other DNA
acatatccccaactgaaaca

SEQ ID NO: 378 - DNA, 20 bp, synthetic construct
  source 1..20: mol_type = other DNA
tcactgatgacatatcccca

SEQ ID NO: 379 - DNA, 20 bp, synthetic construct
  source 1..20: mol_type = other DNA
gagtatagaaatttcactga

SEQ ID NO: 380 - DNA, 20 bp, synthetic construct
  source 1..20: mol_type = other DNA
tgcagcttggaggaggagta

SEQ ID NO: 381 - DNA, 20 bp, synthetic construct
  source 1..20: mol_type = other DNA
gcattttaacaagatcccca

SEQ ID NO: 382 - DNA, 20 bp, synthetic construct
  source 1..20: mol_type = other DNA
ctgaatcaaaatctgcattt

SEQ ID NO: 383 - DNA, 20 bp, synthetic construct
  source 1..20: mol_type = other DNA
tccagactggatttactgaa

SEQ ID NO: 384 - DNA, 20 bp, synthetic construct
  source 1..20: mol_type = other DNA
ttatccttgagggtctcata

SEQ ID NO: 385 - DNA, 20 bp, synthetic construct
  source 1..20: mol_type = other DNA
catcacatgcttatccttga

SEQ ID NO: 386 - DNA, 20 bp, synthetic construct
  source 1..20: mol_type = other DNA
ttccccagagcagctctgag

SEQ ID NO: 387 - DNA, 20 bp, synthetic construct
  source 1..20: mol_type = other DNA
gcggcagagccaggactgaa

SEQ ID NO: 388 - DNA, 20 bp, synthetic construct
  source 1..20: mol_type = other DNA
gtcatccagtatagcctaat

SEQ ID NO: 389 - DNA, 20 bp, synthetic construct
  source 1..20: mol_type = other DNA
taaagaggctgggccataga

SEQ ID NO: 390 - DNA, 20 bp, synthetic construct
  source 1..20: mol_type = other DNA
tcaaacctaggttcagactt

SEQ ID NO: 391 - DNA, 20 bp, synthetic construct
  source 1..20: mol_type = other DNA
aggaaggaaatgctaggcct

SEQ ID NO: 392 - DNA, 20 bp, synthetic construct
  source 1..20: mol_type = other DNA
acaggaagcctggtgactgc

SEQ ID NO: 393 - DNA, 20 bp, synthetic construct
  source 1..20: mol_type = other DNA
caggcagcctgaaggacact

SEQ ID NO: 394 - DNA, 20 bp, synthetic construct
  source 1..20: mol_type = other DNA
aggacagaggttcaacatcc

SEQ ID NO: 395 - DNA, 20 bp, synthetic construct
  source 1..20: mol_type = other DNA
agaccacatgaagtatctaa

SEQ ID NO: 396 - DNA, 20 bp, synthetic construct
  source 1..20: mol_type = other DNA
gctatagaatcagacagacc

SEQ ID NO: 397 - DNA, 20 bp, synthetic construct
  source 1..20: mol_type = other DNA
cctacagcagagggaagatg

SEQ ID NO: 398 - DNA, 20 bp, synthetic construct
  source 1..20: mol_type = other DNA
cagtgcctacagcagaggga

SEQ ID NO: 399 - DNA, 20 bp, synthetic construct
  source 1..20: mol_type = other DNA
gatgctggatccagtgccta

SEQ ID NO: 400 - DNA, 20 bp, synthetic construct
  source 1..20: mol_type = other DNA
gtgggaaaggcacaggcttt

SEQ ID NO: 401 - DNA, 20 bp, synthetic construct
  source 1..20: mol_type = other DNA
gatggcaacctaaggagtga

SEQ ID NO: 402 - DNA, 20 bp, synthetic construct
  source 1..20: mol_type = other DNA
gttcttgggcctaaaggtga

SEQ ID NO: 403 - DNA, 20 bp, synthetic construct
  source 1..20: mol_type = other DNA
attagcagtagctcaggaga

SEQ ID NO: 404 - DNA, 20 bp, synthetic construct
  source 1..20: mol_type = other DNA
ctggtccagggagagaccaa

SEQ ID NO: 405 - DNA, 20 bp, synthetic construct
  source 1..20: mol_type = other DNA
agagggttccatggcacaaa

SEQ ID NO: 406 - DNA, 20 bp, synthetic construct
  source 1..20: mol_type = other DNA
aatttccttacagggtattg

SEQ ID NO: 407 - DNA, 20 bp, synthetic construct
  source 1..20: mol_type = other DNA
tcatgagaagcttagaaggc

SEQ ID NO: 408 - DNA, 20 bp, synthetic construct
  source 1..20: mol_type = other DNA
caacaggctctggttccatg

SEQ ID NO: 409 - DNA, 20 bp, synthetic construct
  source 1..20: mol_type = other DNA
caggccccactgcttagagg

SEQ ID NO: 410 - DNA, 20 bp, synthetic construct
  source 1..20: mol_type = other DNA
aaatggtagccccttgttgc

SEQ ID NO: 411 - DNA, 20 bp, synthetic construct
  source 1..20: mol_type = other DNA
tttcccatgggagaagataa

SEQ ID NO: 412 - DNA, 20 bp, synthetic construct
  source 1..20: mol_type = other DNA
agcgcagagcccatcagcct

SEQ ID NO: 413 - DNA, 20 bp, synthetic construct
  source 1..20: mol_type = other DNA
cagggtgactttgccccatt

SEQ ID NO: 414 - DNA, 20 bp, synthetic construct
  source 1..20: mol_type = other DNA
tggcactaagctaggcacac

SEQ ID NO: 415 - DNA, 20 bp, synthetic construct
  source 1..20: mol_type = other DNA
agggaggccttgcacttacc

SEQ ID NO: 416 - DNA, 20 bp, synthetic construct
  source 1..20: mol_type = other DNA
tgaggcccttcagcttgtgc

SEQ ID NO: 417 - DNA, 20 bp, synthetic construct
  source 1..20: mol_type = other DNA
aaaccctcgactgagtgtga

SEQ ID NO: 418 - DNA, 20 bp, synthetic construct
  source 1..20: mol_type = other DNA
ccttccagggaataaaatac

SEQ ID NO: 419 - DNA, 20 bp, synthetic construct
  source 1..20: mol_type = other DNA
ccaccttccagggaataaaa

SEQ ID NO: 420 - DNA, 20 bp, synthetic construct
  source 1..20: mol_type = other DNA
ctgccaccttccagggaata

SEQ ID NO: 421 - DNA, 20 bp, synthetic construct
  source 1..20: mol_type = other DNA
aacactcacagcactttacc

SEQ ID NO: 422 - DNA, 20 bp, synthetic construct
  source 1..20: mol_type = other DNA
tggatactcagaagagcagt

SEQ ID NO: 423 - DNA, 20 bp, synthetic construct
  source 1..20: mol_type = other DNA
cagagttatcctcaattcac

SEQ ID NO: 424 - DNA, 20 bp, synthetic construct
  source 1..20: mol_type = other DNA
acaccaggatctcagtcact

SEQ ID NO: 425 - DNA, 20 bp, synthetic construct
  source 1..20: mol_type = other DNA
gcctggacaagtcctgccca

SEQ ID NO: 426 - DNA, 20 bp, synthetic construct
  source 1..20: mol_type = other DNA
gaaacaggcagtaggaaatc

SEQ ID NO: 427 - DNA, 20 bp, synthetic construct
  source 1..20: mol_type = other DNA
atggagtgacagggcaggaa

SEQ ID NO: 428 - DNA, 20 bp, synthetic construct
  source 1..20: mol_type = other DNA
aggccacagtggcaacagag

SEQ ID NO: 429 - DNA, 20 bp, synthetic construct
  source 1..20: mol_type = other DNA
gttcttttggaagggtggag

SEQ ID NO: 430 - DNA, 20 bp, synthetic construct
  source 1..20: mol_type = other DNA
ggagccctcacagggccagg

SEQ ID NO: 431 - DNA, 20 bp, synthetic construct
  source 1..20: mol_type = other DNA
ggacaggagggtcacacaca

SEQ ID NO: 432 - DNA, 20 bp, synthetic construct
  source 1..20: mol_type = other DNA
agatggacaggtgattctaa

SEQ ID NO: 433 - DNA, 20 bp, synthetic construct
  source 1..20: mol_type = other DNA
ttaagctttgtgaccttggg

SEQ ID NO: 434 - DNA, 20 bp, synthetic construct
  source 1..20: mol_type = other DNA
gggaaggataccgccaatga

SEQ ID NO: 435 - DNA, 20 bp, synthetic construct
  source 1..20: mol_type = other DNA
cagtgggccccaggtggctc

SEQ ID NO: 436 - DNA, 20 bp, synthetic construct
  source 1..20: mol_type = other DNA
ggtgggaaacttggaaactt

SEQ ID NO: 437 - DNA, 20 bp, synthetic construct
  source 1..20: mol_type = other DNA
acaattcctggataacaagg

SEQ ID NO: 438 - DNA, 20 bp, synthetic construct
  source 1..20: mol_type = other DNA
tagaaatacaattcctggat

SEQ ID NO: 439 - DNA, 20 bp, synthetic construct
  source 1..20: mol_type = other DNA
tgtccttatcaaaatccctc

SEQ ID NO: 440 - DNA, 20 bp, synthetic construct
  source 1..20: mol_type = other DNA
gctgagagagacaatgagta

SEQ ID NO: 441 - DNA, 20 bp, synthetic construct
  source 1..20: mol_type = other DNA
gattattctaaaactcaaat

SEQ ID NO: 442 - DNA, 20 bp, synthetic construct
  source 1..20: mol_type = other DNA
accagctgcaaggatgacct

SEQ ID NO: 443 - DNA, 20 bp, synthetic construct
  source 1..20: mol_type = other DNA
gaggctcaggccttgacaac

SEQ ID NO: 444 - DNA, 20 bp, synthetic construct
  source 1..20: mol_type = other DNA
tgttatccgagttgaattct

SEQ ID NO: 445 - DNA, 20 bp, synthetic construct
  source 1..20: mol_type = other DNA
gttttgggaactcatgcatt

SEQ ID NO: 446 - DNA, 20 bp, synthetic construct
  source 1..20: mol_type = other DNA
cagctaatgatacaaggttg

SEQ ID NO: 447 - DNA, 20 bp, synthetic construct
  source 1..20: mol_type = other DNA
gctattcatttttctgagcc

SEQ ID NO: 448 - DNA, 20 bp, synthetic construct
  source 1..20: mol_type = other DNA
agaggccctggacactggcc

SEQ ID NO: 449 - DNA, 20 bp, synthetic construct
  source 1..20: mol_type = other DNA
tcagcctagaggccctggac

SEQ ID NO: 450 - DNA, 20 bp, synthetic construct
  source 1..20: mol_type = other DNA
ccaacagtggtgatgggctt

SEQ ID NO: 451 - DNA, 20 bp, synthetic construct
  source 1..20: mol_type = other DNA
gcttaccaacagtggtgatg

SEQ ID NO: 452 - DNA, 20 bp, synthetic construct
  source 1..20: mol_type = other DNA
ccactggagcactgagatga

SEQ ID NO: 453 - DNA, 20 bp, synthetic construct
  source 1..20: mol_type = other DNA
cccactggagcactgagatg

SEQ ID NO: 454 - DNA, 20 bp, synthetic construct
  source 1..20: mol_type = other DNA
acccactggagcactgagat

SEQ ID NO: 455 - DNA, 20 bp, synthetic construct
  source 1..20: mol_type = other DNA
gacccactggagcactgaga

SEQ ID NO: 456 - DNA, 20 bp, synthetic construct
  source 1..20: mol_type = other DNA
ggacccactggagcactgag

SEQ ID NO: 457 - DNA, 20 bp, synthetic construct
  source 1..20: mol_type = other DNA
caggacccactggagcactg

SEQ ID NO: 458 - DNA, 20 bp, synthetic construct
  source 1..20: mol_type = other DNA
acaggacccactggagcact

SEQ ID NO: 459 - DNA, 20 bp, synthetic construct
  source 1..20: mol_type = other DNA
tttcggacccactgtgacct

SEQ ID NO: 460 - DNA, 20 bp, synthetic construct
  source 1..20: mol_type = other DNA
gtttcggacccactgtgacc

SEQ ID NO: 461 - DNA, 20 bp, synthetic construct
  source 1..20: mol_type = other DNA
agtttcggacccactgtgac

SEQ ID NO: 462 - DNA, 20 bp, synthetic construct
  source 1..20: mol_type = other DNA
ccagtttcggacccactgtg

SEQ ID NO: 463 - DNA, 20 bp, synthetic construct
  source 1..20: mol_type = other DNA
cccagtttcggacccactgt

SEQ ID NO: 464 - DNA, 20 bp, synthetic construct
  source 1..20: mol_type = other DNA
tggacaagtcctgcccatct

SEQ ID NO: 465 - DNA, 20 bp, synthetic construct
  source 1..20: mol_type = other DNA
ctggacaagtcctgcccatc

SEQ ID NO: 466 - DNA, 20 bp, synthetic construct
  source 1..20: mol_type = other DNA
cctggacaagtcctgcccat

SEQ ID NO: 467 - DNA, 20 bp, synthetic construct
  source 1..20: mol_type = other DNA
agcctggacaagtcctgccc

SEQ ID NO: 468 - DNA, 20 bp, synthetic construct
  source 1..20: mol_type = other DNA
cagcctggacaagtcctgcc

SEQ ID NO: 469 - DNA, 20 bp, synthetic construct
  source 1..20: mol_type = other DNA
gcagcctggacaagtcctgc

SEQ ID NO: 470 - DNA, 20 bp, synthetic construct
  source 1..20: mol_type = other DNA
tgcagcctggacaagtcctg

SEQ ID NO: 471 - DNA, 20 bp, synthetic construct
  source 1..20: mol_type = other DNA
caggaccccggagtaggcgg

SEQ ID NO: 472 - DNA, 20 bp, synthetic construct
  source 1..20: mol_type = other DNA
gcaggaccccggagtaggcg

SEQ ID NO: 473 - DNA, 20 bp, synthetic construct
  source 1..20: mol_type = other DNA
gcgcaggaccccggagtagg

SEQ ID NO: 474 - DNA, 20 bp, synthetic construct
  source 1..20: mol_type = other DNA
cgcgcaggaccccggagtag

SEQ ID NO: 475 - DNA, 20 bp, synthetic construct
  source 1..20: mol_type = other DNA
ccgcgcaggaccccggagta

SEQ ID NO: 476 - DNA, 20 bp, synthetic construct
  source 1..20: mol_type = other DNA
aggtaaggccgtatgcctgg

SEQ ID NO: 477 - DNA, 20 bp, synthetic construct
  source 1..20: mol_type = other DNA
caggtaaggccgtatgcctg

SEQ ID NO: 478 - DNA, 20 bp, synthetic construct
  source 1..20: mol_type = other DNA
gccaggtaaggccgtatgcc

SEQ ID NO: 479 - DNA, 20 bp, synthetic construct
  source 1..20: mol_type = other DNA
agccaggtaaggccgtatgc

SEQ ID NO: 480 - DNA, 20 bp, synthetic construct
  source 1..20: mol_type = other DNA
attgccactcccattctttg

SEQ ID NO: 481 - DNA, 20 bp, synthetic construct
  source 1..20: mol_type = other DNA
cattgccactcccattcttt

SEQ ID NO: 482 - DNA, 20 bp, synthetic construct
  source 1..20: mol_type = other DNA
agcattgccactcccattct

SEQ ID NO: 483 - DNA, 20 bp, synthetic construct
  source 1..20: mol_type = other DNA
tagcattgccactcccattc

SEQ ID NO: 484 - DNA, 20 bp, synthetic construct
  source 1..20: mol_type = other DNA
atagcattgccactcccatt

SEQ ID NO: 485 - DNA, 20 bp, synthetic construct
  source 1..20: mol_type = other DNA
gatagcattgccactcccat

SEQ ID NO: 486 - DNA, 20 bp, synthetic construct
  source 1..20: mol_type = other DNA
tgatagcattgccactccca

SEQ ID NO: 487 - DNA, 20 bp, synthetic construct
  source 1..20: mol_type = other DNA
ctcagagactcagccgcacc

SEQ ID NO: 488 - DNA, 20 bp, synthetic construct
  source 1..20: mol_type = other DNA
gctcagagactcagccgcac

SEQ ID NO: 489 - DNA, 20 bp, synthetic construct
  source 1..20: mol_type = other DNA
gagctcagagactcagccgc

SEQ ID NO: 490 - DNA, 20 bp, synthetic construct
  source 1..20: mol_type = other DNA
ggagctcagagactcagccg

SEQ ID NO: 491 - DNA, 20 bp, synthetic construct
  source 1..20: mol_type = other DNA
atggagctcagagactcagc

SEQ ID NO: 492 - DNA, 20 bp, synthetic construct
  source 1..20: mol_type = other DNA
catggagctcagagactcag

SEQ ID NO: 493 - DNA, 20 bp, synthetic construct
  source 1..20: mol_type = other DNA
gcatggagctcagagactca

SEQ ID NO: 494 - DNA, 20 bp, synthetic construct
  source 1..20: mol_type = other DNA
ggcatggagctcagagactc

SEQ ID NO: 495 - DNA, 20 bp, synthetic construct
  source 1..20: mol_type = other DNA
caggcatggagctcagagac

SEQ ID NO: 496 - DNA, 20 bp, synthetic construct
  source 1..20: mol_type = other DNA
accccatctcccagacccct

SEQ ID NO: 497 - DNA, 20 bp, synthetic construct
  source 1..20: mol_type = other DNA
cactcaccccatctcccaga

SEQ ID NO: 498 - DNA, 20 bp, synthetic construct
  source 1..20: mol_type = other DNA
caggtccataacccctgcgc

SEQ ID NO: 499 - DNA, 20 bp, synthetic construct
  source 1..20: mol_type = other DNA
tctcgcaggtccataacccc

SEQ ID NO: 500 - DNA, 20 bp, synthetic construct
  source 1..20: mol_type = other DNA
aatcttctcgcaggtccata

SEQ ID NO: 501 - DNA, 20 bp, synthetic construct
  source 1..20: mol_type = other DNA
cagaaaatcttctcgcaggt

SEQ ID NO: 502 - DNA, 20 bp, synthetic construct
  source 1..20: mol_type = other DNA
ctttccagaaaatcttctcg

SEQ ID NO: 503 - DNA, 20 bp, synthetic construct
  source 1..20: mol_type = other DNA
gggccctttccagaaaatct

SEQ ID NO: 504 - DNA, 20 bp, synthetic construct
  source 1..20: mol_type = other DNA
ccacagggccctttccagaa

SEQ ID NO: 505 - DNA, 20 bp, synthetic construct
  source 1..20: mol_type = other DNA
gcctgccacagggccctttc

SEQ ID NO: 506 - DNA, 20 bp, synthetic construct
  source 1..20: mol_type = other DNA
caccagcctgccacagggcc

SEQ ID NO: 507 - DNA, 20 bp, synthetic construct
  source 1..20: mol_type = other DNA
cacggatgagggaaacaagc

SEQ ID NO: 508 - DNA, 20 bp, synthetic construct
  source 1..20: mol_type = other DNA
aatatccctaataactaaga

SEQ ID NO: 509 - DNA, 20 bp, synthetic construct
  source 1..20: mol_type = other DNA
tctcgaatatccctaataac

SEQ ID NO: 510 - DNA, 20 bp, synthetic construct
  source 1..20: mol_type = other DNA
ggagttctcgaatatcccta

SEQ ID NO: 511 - DNA, 20 bp, synthetic construct
  source 1..20: mol_type = other DNA
aaacccataccatcctgccc

SEQ ID NO: 512 - DNA, 20 bp, synthetic construct
  source 1..20: mol_type = other DNA
tggtggctgtctcaggagac

SEQ ID NO: 513 - DNA, 20 bp, synthetic construct
  source 1..20: mol_type = other DNA
ccgtctggtggctgtctcag

SEQ ID NO: 514 - DNA, 20 bp, synthetic construct
  source 1..20: mol_type = other DNA
ggcagacacacctgttccag

SEQ ID NO: 515 - DNA, 20 bp, synthetic construct
  source 1..20: mol_type = other DNA
gacagggcagacacacctgt

SEQ ID NO: 516 - DNA, 20 bp, synthetic construct
  source 1..20: mol_type = other DNA
cagaggacagggcagacaca

SEQ ID NO: 517 - DNA, 20 bp, synthetic construct
  source 1..20: mol_type = other DNA
ccagagcctgggcgagagga

SEQ ID NO: 518 - DNA, 20 bp, synthetic construct
  source 1..20: mol_type = other DNA
cagggtcctctccgctgcct

SEQ ID NO: 519 - DNA, 20 bp, synthetic construct
  source 1..20: mol_type = other DNA
ctgaggacctcagttctacc

SEQ ID NO: 520 - DNA, 20 bp, synthetic construct
  source 1..20: mol_type = other DNA
attcactgaggacctcagtt

SEQ ID NO: 521 - DNA, 20 bp, synthetic construct
  source 1..20: mol_type = other DNA
gcgcgattcactgaggacct

SEQ ID NO: 522 - DNA, 20 bp, synthetic construct
  source 1..20: mol_type = other DNA
actctgcgcgattcactgag

SEQ ID NO: 523 - DNA, 20 bp, synthetic construct
  source 1..20: mol_type = other DNA
ctcccacttcagtttctcca

SEQ ID NO: 524 - DNA, 20 bp, synthetic construct
  source 1..20: mol_type = other DNA
gcttcctcccacttcagttt

SEQ ID NO: 525 - DNA, 20 bp, synthetic construct
  source 1..20: mol_type = other DNA
ggcatgcttcctcccacttc

SEQ ID NO: 526 - DNA, 20 bp, synthetic construct
  source 1..20: mol_type = other DNA
acttaggcatgcttcctccc

SEQ ID NO: 527 - DNA, 20 bp, synthetic construct
  source 1..20: mol_type = other DNA
ggaaaacttaggcatgcttc

SEQ ID NO: 528 - DNA, 20 bp, synthetic construct
  source 1..20: mol_type = other DNA
gctaaggaaaacttaggcat

SEQ ID NO: 529 - DNA, 20 bp, synthetic construct
  source 1..20: mol_type = other DNA
catcagctaaggaaaactta

SEQ ID NO: 530 - DNA, 20 bp, synthetic construct
  source 1..20: mol_type = other DNA
caaggcatcagctaaggaaa

SEQ ID NO: 531 - DNA, 20 bp, synthetic construct
  source 1..20: mol_type = other DNA
atttgtacttgaatccaggg

SEQ ID NO: 532 - DNA, 20 bp, synthetic construct
  source 1..20: mol_type = other DNA
gtgatgacttcccagggtct

SEQ ID NO: 533 - DNA, 20 bp, synthetic construct
  source 1..20: mol_type = other DNA
cagctgtgatgacttcccag

SEQ ID NO: 534 - DNA, 20 bp, synthetic construct
  source 1..20: mol_type = other DNA
caggacagctgtgatgactt

SEQ ID NO: 535 - DNA, 20 bp, synthetic construct
  source 1..20: mol_type = other DNA
cagaccaggacagctgtgat

SEQ ID NO: 536 - DNA, 20 bp, synthetic construct
  source 1..20: mol_type = other DNA
cacacgcagaccaggacagc

SEQ ID NO: 537 - DNA, 20 bp, synthetic construct
  source 1..20: mol_type = other DNA
agacacacacgcagaccagg

SEQ ID NO: 538 - DNA, 20 bp, synthetic construct
  source 1..20: mol_type = other DNA
atgcaagacacacacgcaga

SEQ ID NO: 539 - DNA, 20 bp, synthetic construct
  source 1..20: mol_type = other DNA
gcttcatgcaagacacacac

SEQ ID NO: 540 - DNA, 20 bp, synthetic construct
  source 1..20: mol_type = other DNA
atgtcagagaggctcagcaa

SEQ ID NO: 541 - DNA, 20 bp, synthetic construct
  source 1..20: mol_type = other DNA
aatccatgtcagagaggctc

SEQ ID NO: 542 - DNA, 20 bp, synthetic construct
  source 1..20: mol_type = other DNA
agaaaaatccatgtcagaga

SEQ ID NO: 543 - DNA, 20 bp, synthetic construct
  source 1..20: mol_type = other DNA
actaaagaaaaatccatgtc

SEQ ID NO: 544 - DNA, 20 bp, synthetic construct
  source 1..20: mol_type = other DNA
tagttactaaagaaaaatcc

SEQ ID NO: 545 - DNA, 20 bp, synthetic construct
  source 1..20: mol_type = other DNA
ggatagtcgatttaccagaa

SEQ ID NO: 546 - DNA, 20 bp, synthetic construct
  source 1..20: mol_type = other DNA
tctttggatagtcgatttac

SEQ ID NO: 547 - DNA, 20 bp, synthetic construct
  source 1..20: mol_type = other DNA
actaaaatgctaataggaag

SEQ ID NO: 548 - DNA, 20 bp, synthetic construct
  source 1..20: mol_type = other DNA
gatatactaaaatgctaata

SEQ ID NO: 549 - DNA, 20 bp, synthetic construct
  source 1..20: mol_type = other DNA
caagagatatactaaaatgc

SEQ ID NO: 550 - DNA, 20 bp, synthetic construct
  source 1..20: mol_type = other DNA
atgatcaagagatatactaa

SEQ ID NO: 551 - DNA, 20 bp, synthetic construct
  source 1..20: mol_type = other DNA
agaaaatgatcaagagatat

SEQ ID NO: 552 - DNA, 20 bp, synthetic construct
  source 1..20: mol_type = other DNA
tataaagaaaatgatcaaga

SEQ ID NO: 553 - DNA, 20 bp, synthetic construct
  source 1..20: mol_type = other DNA
atgtgtataaagaaaatgat

SEQ ID NO: 554 - DNA, 20 bp, synthetic construct
  source 1..20: mol_type = other DNA
atgcaatgtgtataaagaaa

SEQ ID NO: 555 - DNA, 20 bp, synthetic construct
  source 1..20: mol_type = other DNA
tatctatgcaatgtgtataa

SEQ ID NO: 556 - DNA, 20 bp, synthetic construct
  source 1..20: mol_type = other DNA
attcataactatatctacag

SEQ ID NO: 557 - DNA, 20 bp, synthetic construct
  source 1..20: mol_type = other DNA
acaagattcataactatatc

SEQ ID NO: 558 - DNA, 20 bp, synthetic construct
  source 1..20: mol_type = other DNA
agaaaacaagattcataact

SEQ ID NO: 559 - DNA, 20 bp, synthetic construct
  source 1..20: mol_type = other DNA
cctcgatgttacattaaggg

SEQ ID NO: 560 - DNA, 20 bp, synthetic construct
  source 1..20: mol_type = other DNA
ggaaacctcgatgttacatt

SEQ ID NO: 561 - DNA, 20 bp, synthetic construct
  source 1..20: mol_type = other DNA
attgcaaccactaggacatt

SEQ ID NO: 562 - DNA, 20 bp, synthetic construct
  source 1..20: mol_type = other DNA
gggttattgcaaccactagg

SEQ ID NO: 563 - DNA, 20 bp, synthetic construct
  source 1..20: mol_type = other DNA
cacagttaaagtgtggtaca

SEQ ID NO: 564 - DNA, 20 bp, synthetic construct
  source 1..20: mol_type = other DNA
taggtcacagttaaagtgtg

SEQ ID NO: 565 - DNA, 20 bp, synthetic construct
  source 1..20: mol_type = other DNA
atgcctaggtcacagttaaa

SEQ ID NO: 566 - DNA, 20 bp, synthetic construct
  source 1..20: mol_type = other DNA
tgccaatgcctaggtcacag

SEQ ID NO: 567 - DNA, 20 bp, synthetic construct
  source 1..20: mol_type = other DNA
agcaatgccaatgcctaggt

SEQ ID NO: 568 - DNA, 20 bp, synthetic construct
  source 1..20: mol_type = other DNA
cacagcgataatcacacaag

SEQ ID NO: 569 - DNA, 20 bp, synthetic construct
  source 1..20: mol_type = other DNA
acggccccgcgggaagccgc

SEQ ID NO: 570 - DNA, 20 bp, synthetic construct
  source 1..20: mol_type = other DNA
cagtcacggccccgcgggaa

SEQ ID NO: 571 - DNA, 20 bp, synthetic construct
  source 1..20: mol_type = other DNA
ccgcccagtcacggccccgc

SEQ ID NO: 572 - DNA, 20 bp, synthetic construct
  source 1..20: mol_type = other DNA
gaagcccgcccagtcacggc

SEQ ID NO: 573 - DNA, 20 bp, synthetic construct
  source 1..20: mol_type = other DNA
gacacctggagctgcggccg

SEQ ID NO: 574 - DNA, 20 bp, synthetic construct
  source 1..20: mol_type = other DNA
ggacacctggagctgcggcc

SEQ ID NO: 575 - DNA, 20 bp, synthetic construct
  source 1..20: mol_type = other DNA
aggacacctggagctgcggc

SEQ ID NO: 576 - DNA, 20 bp, synthetic construct
  source 1..20: mol_type = other DNA
taggacacctggagctgcgg

SEQ ID NO: 577 - DNA, 20 bp, synthetic construct
  source 1..20: mol_type = other DNA
gctaggacacctggagctgc

SEQ ID NO: 578 - DNA, 20 bp, synthetic construct
  source 1..20: mol_type = other DNA
ggctaggacacctggagctg

SEQ ID NO: 579 - DNA, 20 bp, synthetic construct
  source 1..20: mol_type = other DNA
cagggcttcgcgcagagcac

SEQ ID NO: 580 - DNA, 20 bp, synthetic construct
  source 1..20: mol_type = other DNA
ccagggcttcgcgcagagca

SEQ ID NO: 581 - DNA, 20 bp, synthetic construct
  source 1..20: mol_type = other DNA
ggccagggcttcgcgcagag

SEQ ID NO: 582 - DNA, 20 bp, synthetic construct
  source 1..20: mol_type = other DNA
tgagggtcttcatggctgaa

SEQ ID NO: 583 - DNA, 20 bp, synthetic construct
  source 1..20: mol_type = other DNA
tatgagggtcttcatggctg

SEQ ID NO: 584 - DNA, 20 bp, synthetic construct
  source 1..20: mol_type = other DNA
ctatgagggtcttcatggct

SEQ ID NO: 585 - DNA, 20 bp, synthetic construct
  source 1..20: mol_type = other DNA
gctatgagggtcttcatggc

SEQ ID NO: 586 - DNA, 20 bp, synthetic construct
  source 1..20: mol_type = other DNA
cggctatgagggtcttcatg

SEQ ID NO: 587 - DNA, 20 bp, synthetic construct
  source 1..20: mol_type = other DNA
gcggctatgagggtcttcat

SEQ ID NO: 588 - DNA, 20 bp, synthetic construct
  source 1..20: mol_type = other DNA
ggcggctatgagggtcttca

SEQ ID NO: 589 - DNA, 20 bp, synthetic construct
  source 1..20: mol_type = other DNA
aggcggctatgagggtcttc

SEQ ID NO: 590 - DNA, 20 bp, synthetic construct
  source 1..20: mol_type = other DNA
gtaggcggctatgagggtct

SEQ ID NO: 591 - DNA, 20 bp, synthetic construct
  source 1..20: mol_type = other DNA
agtaggcggctatgagggtc

SEQ ID NO: 592 - DNA, 20 bp, synthetic construct
  source 1..20: mol_type = other DNA
ggagtaggcggctatgaggg

SEQ ID NO: 593 - DNA, 20 bp, synthetic construct
  source 1..20: mol_type = other DNA
cggagtaggcggctatgagg

SEQ ID NO: 594 - DNA, 20 bp, synthetic construct
  source 1..20: mol_type = other DNA
cccggagtaggcggctatga

SEQ ID NO: 595 - DNA, 20 bp, synthetic construct
  source 1..20: mol_type = other DNA
ccccggagtaggcggctatg

SEQ ID NO: 596 - DNA, 20 bp, synthetic construct
  source 1..20: mol_type = other DNA
gaccccggagtaggcggcta

SEQ ID NO: 597 - DNA, 20 bp, synthetic construct
  source 1..20: mol_type = other DNA
ggaccccggagtaggcggct

SEQ ID NO: 598 - DNA, 20 bp, synthetic construct
  source 1..20: mol_type = other DNA
cggtcagcctcggcctgacg

SEQ ID NO: 599 - DNA, 20 bp, synthetic construct
  source 1..20: mol_type = other DNA
ccggtcagcctcggcctgac

SEQ ID NO: 600 - DNA, 20 bp, synthetic construct
  source 1..20: mol_type = other DNA
ctccggtcagcctcggcctg

SEQ ID NO: 601 - DNA, 20 bp, synthetic construct
  source 1..20: mol_type = other DNA
gctccggtcagcctcggcct

SEQ ID NO: 602 - DNA, 20 bp, synthetic construct
  source 1..20: mol_type = other DNA
tggctccggtcagcctcggc

SEQ ID NO: 603 - DNA, 20 bp, synthetic construct
  source 1..20: mol_type = other DNA
ctggctccggtcagcctcgg

SEQ ID NO: 604 - DNA, 20 bp, synthetic construct
  source 1..20: mol_type = other DNA
gctggctccggtcagcctcg

SEQ ID NO: 605 - DNA, 20 bp, synthetic construct
  source 1..20: mol_type = other DNA
cgctggctccggtcagcctc

SEQ ID NO: 606 - DNA, 20 bp, synthetic construct
  source 1..20: mol_type = other DNA
gcgctggctccggtcagcct

SEQ ID NO: 607 - DNA, 20 bp, synthetic construct
  source 1..20: mol_type = other DNA
gcaggtcctccgtgagagcg

SEQ ID NO: 608 - DNA, 20 bp, synthetic construct
  source 1..20: mol_type = other DNA
cgcaggtcctccgtgagagc

SEQ ID NO: 609 - DNA, 20 bp, synthetic construct
  source 1..20: mol_type = other DNA
gcgcaggtcctccgtgagag

SEQ ID NO: 610 - DNA, 20 bp, synthetic construct
  source 1..20: mol_type = other DNA
agcgcaggtcctccgtgaga

SEQ ID NO: 611 - DNA, 20 bp, synthetic construct
  source 1..20: mol_type = other DNA
cagcgcaggtcctccgtgag

SEQ ID NO: 612 - DNA, 20 bp, synthetic construct
  source 1..20: mol_type = other DNA
acagcgcaggtcctccgtga

SEQ ID NO: 613 - DNA, 20 bp, synthetic construct
  source 1..20: mol_type = other DNA
gacagcgcaggtcctccgtg

SEQ ID NO: 614 - DNA, 20 bp, synthetic construct
  source 1..20: mol_type = other DNA
gcgacagcgcaggtcctccg

SEQ ID NO: 615 - DNA, 20 bp, synthetic construct
  source 1..20: mol_type = other DNA
cgcgacagcgcaggtcctcc

SEQ ID NO: 616 - DNA, 20 bp, synthetic construct
  source 1..20: mol_type = other DNA
gcgcgacagcgcaggtcctc

SEQ ID NO: 617 - DNA, 20 bp, synthetic construct
  source 1..20: mol_type = other DNA
cgcgcgacagcgcaggtcct

SEQ ID NO: 618 - DNA, 20 bp, synthetic construct
  source 1..20: mol_type = other DNA
tcgcgcgacagcgcaggtcc

SEQ ID NO: 619 - DNA, 20 bp, synthetic construct
  source 1..20: mol_type = other DNA
ctcgcgcgacagcgcaggtc

SEQ ID NO: 620 - DNA, 20 bp, synthetic construct
  source 1..20: mol_type = other DNA
cctcgcgcgacagcgcaggt

SEQ ID NO: 621 - DNA, 20 bp, synthetic construct
  source 1..20: mol_type = other DNA
ccctcgcgcgacagcgcagg

SEQ ID NO: 622 - DNA, 20 bp, synthetic construct
  source 1..20: mol_type = other DNA
acccctcgcgcgacagcgca

SEQ ID NO: 623 - DNA, 20 bp, synthetic construct
  source 1..20: mol_type = other DNA
gacccctcgcgcgacagcgc

SEQ ID NO: 624 - DNA, 20 bp, synthetic construct
  source 1..20: mol_type = other DNA
agacccctcgcgcgacagcg

SEQ ID NO: 625 - DNA, 20 bp, synthetic construct
  source 1..20: mol_type = other DNA
cagacccctcgcgcgacagc

SEQ ID NO: 626 - DNA, 20 bp, synthetic construct
  source 1..20: mol_type = other DNA
ccagacccctcgcgcgacag

SEQ ID NO: 627 - DNA, 20 bp, synthetic construct
  source 1..20: mol_type = other DNA
cccagacccctcgcgcgaca

SEQ ID NO: 628 - DNA, 20 bp, synthetic construct
  source 1..20: mol_type = other DNA
ctcccagacccctcgcgcga

SEQ ID NO: 629 - DNA, 20 bp, synthetic construct
  source 1..20: mol_type = other DNA
tctcccagacccctcgcgcg

SEQ ID NO: 630 - DNA, 20 bp, synthetic construct
  source 1..20: mol_type = other DNA
atctcccagacccctcgcgc

SEQ ID NO: 631 - DNA, 20 bp, synthetic construct
  source 1..20: mol_type = other DNA
catctcccagacccctcgcg

SEQ ID NO: 632 - DNA, 20 bp, synthetic construct
  source 1..20: mol_type = other DNA
ccatctcccagacccctcgc

SEQ ID NO: 633 - DNA, 20 bp, synthetic construct
  source 1..20: mol_type = other DNA
ccccatctcccagacccctc

SEQ ID NO: 634 - DNA, 20 bp, synthetic construct
  source 1..20: mol_type = other DNA
gccccatctcccagacccct

SEQ ID NO: 635 - DNA, 20 bp, synthetic construct
  source 1..20: mol_type = other DNA
tgccccatctcccagacccc

SEQ ID NO: 636 - DNA, 20 bp, synthetic construct
  source 1..20: mol_type = other DNA
gtgccccatctcccagaccc

SEQ ID NO: 637 - DNA, 20 bp, synthetic construct
  source 1..20: mol_type = other DNA
agtgccccatctcccagacc

SEQ ID NO: 638 - DNA, 20 bp, synthetic construct
  source 1..20: mol_type = other DNA
ccagtgccccatctcccaga

SEQ ID NO: 639 - DNA, 20 bp, synthetic construct
  source 1..20: mol_type = other DNA
tccagtgccccatctcccag

SEQ ID NO: 640 - DNA, 20 bp, synthetic construct
  source 1..20: mol_type = other DNA
gatccagtgccccatctccc

SEQ ID NO: 641 - DNA, 20 bp, synthetic construct
  source 1..20: mol_type = other DNA
ggatccagtgccccatctcc

SEQ ID NO: 642 - DNA, 20 bp, synthetic construct
  source 1..20: mol_type = other DNA
ctggatccagtgccccatct

SEQ ID NO: 643 - DNA, 20 bp, synthetic construct
  source 1..20: mol_type = other DNA
gctggatccagtgccccatc

SEQ ID NO: 644 - DNA, 20 bp, synthetic construct
  source 1..20: mol_type = other DNA
atgctggatccagtgcccca

SEQ ID NO: 645 - DNA, 20 bp, synthetic construct
  source 1..20: mol_type = other DNA
gatgctggatccagtgcccc

SEQ ID NO: 646 - DNA, 20 bp, synthetic construct
  source 1..20: mol_type = other DNA
aggatgctggatccagtgcc

SEQ ID NO: 647 - DNA, 20 bp, synthetic construct
  source 1..20: mol_type = other DNA
gaggatgctggatccagtgc

SEQ ID NO: 648 - DNA, 20 bp, synthetic construct
  source 1..20: mol_type = other DNA
gagaggatgctggatccagt

SEQ ID NO: 649 - DNA, 20 bp, synthetic construct
  source 1..20: mol_type = other DNA
acttctgtggcctctgtgct

SEQ ID NO: 650 - DNA, 20 bp, synthetic construct
  source 1..20: mol_type = other DNA
tcacttctgtggcctctgtg

SEQ ID NO: 651 - DNA, 20 bp, synthetic construct
  source 1..20: mol_type = other DNA
ctcacttctgtggcctctgt

SEQ ID NO: 652 - DNA, 20 bp, synthetic construct
  source 1..20: mol_type = other DNA
tgctcacttctgtggcctct

SEQ ID NO: 653 - DNA, 20 bp, synthetic construct
  source 1..20: mol_type = other DNA
ttgctcacttctgtggcctc

SEQ ID NO: 654 - DNA, 20 bp, synthetic construct
  source 1..20: mol_type = other DNA
tcttgctcacttctgtggcc

SEQ ID NO: 655 - DNA, 20 bp, synthetic construct
  source 1..20: mol_type = other DNA
ttcttgctcacttctgtggc

SEQ ID NO: 656 - DNA, 20 bp, synthetic construct
  source 1..20: mol_type = other DNA
acttcttgctcacttctgtg

SEQ ID NO: 657 - DNA, 20 bp, synthetic construct
  source 1..20: mol_type = other DNA
aacttcttgctcacttctgt

SEQ ID NO: 658 - DNA, 20 bp, synthetic construct
  source 1..20: mol_type = other DNA
ggaacttcttgctcacttct

SEQ ID NO: 659 - DNA, 20 bp, synthetic construct
  source 1..20: mol_type = other DNA
gggaacttcttgctcacttc

SEQ ID NO: 660 - DNA, 20 bp, synthetic construct
  source 1..20: mol_type = other DNA
ctgggaacttcttgctcact

SEQ ID NO: 661 - DNA, 20 bp, synthetic construct
  source 1..20: mol_type = other DNA
cctgggaacttcttgctcac

SEQ ID NO: 662 - DNA, 20 bp, synthetic construct
  source 1..20: mol_type = other DNA
tgcctgggaacttcttgctc

SEQ ID NO: 663 - DNA, 20 bp, synthetic construct
  source 1..20: mol_type = other DNA
atgcctgggaacttcttgct

SEQ ID NO: 664 - DNA, 20 bp, synthetic construct
  source 1..20: mol_type = other DNA
gtatgcctgggaacttcttg

SEQ ID NO: 665 - DNA, 20 bp, synthetic construct
  source 1..20: mol_type = other DNA
cgtatgcctgggaacttctt

SEQ ID NO: 666 - DNA, 20 bp, synthetic construct
  source 1..20: mol_type = other DNA
ccgtatgcctgggaacttct

SEQ ID NO: 667 - DNA, 20 bp, synthetic construct
  source 1..20: mol_type = other DNA
ggccgtatgcctgggaactt

SEQ ID NO: 668 - DNA, 20 bp, synthetic construct
  source 1..20: mol_type = other DNA
aggccgtatgcctgggaact

SEQ ID NO: 669 - DNA, 20 bp, synthetic construct
  source 1..20: mol_type = other DNA
taaggccgtatgcctgggaa

SEQ ID NO: 670 - DNA, 20 bp, synthetic construct
  source 1..20: mol_type = other DNA
gtaaggccgtatgcctggga

SEQ ID NO: 671 - DNA, 20 bp, synthetic construct
  source 1..20: mol_type = other DNA
gtagccaggtaaggccgtat

SEQ ID NO: 672 - DNA, 20 bp, synthetic construct
  source 1..20: mol_type = other DNA
tgtagccaggtaaggccgta

SEQ ID NO: 673 - DNA, 20 bp, synthetic construct
  source 1..20: mol_type = other DNA
agtgtagccaggtaaggccg

SEQ ID NO: 674 - DNA, 20 bp, synthetic construct
  source 1..20: mol_type = other DNA
cagtgtagccaggtaaggcc

SEQ ID NO: 675 - DNA, 20 bp, synthetic construct
  source 1..20: mol_type = other DNA
ccagtgtagccaggtaaggc

SEQ ID NO: 676 - DNA, 20 bp, synthetic construct
  source 1..20: mol_type = other DNA
ggtactccctcaacacaggc

SEQ ID NO: 677 - DNA, 20 bp, synthetic construct
  source 1..20: mol_type = other DNA
aggtactccctcaacacagg

SEQ ID NO: 678 - DNA, 20 bp, synthetic construct
  source 1..20: mol_type = other DNA
tcaggtactccctcaacaca

SEQ ID NO: 679 - DNA, 20 bp, synthetic construct
  source 1..20: mol_type = other DNA
atcaggtactccctcaacac

SEQ ID NO: 680 - DNA, 20 bp, synthetic construct
  source 1..20: mol_type = other DNA
acatcaggtactccctcaac

SEQ ID NO: 681 - DNA, 20 bp, synthetic construct
  source 1..20: mol_type = other DNA
gacatcaggtactccctcaa

SEQ ID NO: 682 - DNA, 20 bp, synthetic construct
  source 1..20: mol_type = other DNA
cagacatcaggtactccctc

SEQ ID NO: 683 - DNA, 20 bp, synthetic construct
  source 1..20: mol_type = other DNA
ccagacatcaggtactccct

SEQ ID NO: 684 - DNA, 20 bp, synthetic construct
  source 1..20: mol_type = other DNA
tccagacatcaggtactccc

SEQ ID NO: 685 - DNA, 20 bp, synthetic construct
  source 1..20: mol_type = other DNA
ctccagacatcaggtactcc

SEQ ID NO: 686 - DNA, 20 bp, synthetic construct
  source 1..20: mol_type = other DNA
gatacctccagacatcaggt

SEQ ID NO: 687 - DNA, 20 bp, synthetic construct
  source 1..20: mol_type = other DNA
agatacctccagacatcagg

SEQ ID NO: 688 - DNA, 20 bp, synthetic construct
  source 1..20: mol_type = other DNA
gcagatacctccagacatca

SEQ ID NO: 689 - DNA, 20 bp, synthetic construct
  source 1..20: mol_type = other DNA
ggcagatacctccagacatc

SEQ ID NO: 690 - DNA, 20 bp, synthetic construct
  source 1..20: mol_type = other DNA
agggcagatacctccagaca

SEQ ID NO: 691 - DNA, 20 bp, synthetic construct
  source 1..20: mol_type = other DNA
cagggcagatacctccagac

SEQ ID NO: 692 - DNA, 20 bp, synthetic construct
  source 1..20: mol_type = other DNA
gacagggcagatacctccag

SEQ ID NO: 693 - DNA, 20 bp, synthetic construct
  source 1..20: mol_type = other DNA
tgacagggcagatacctcca

SEQ ID NO: 694 - DNA, 20 bp, synthetic construct
  source 1..20: mol_type = other DNA
aaatagtctatggtgtcccg

SEQ ID NO: 695 - DNA, 20 bp, synthetic construct
  source 1..20: mol_type = other DNA
caaatagtctatggtgtccc

SEQ ID NO: 696 - DNA, 20 bp, synthetic construct
  source 1..20: mol_type = other DNA
agcaaatagtctatggtgtc

SEQ ID NO: 697 - DNA, 20 bp, synthetic construct
  source 1..20: mol_type = other DNA
aagcaaatagtctatggtgt

SEQ ID NO: 698 - DNA, 20 bp, synthetic construct
  source 1..20: mol_type = other DNA
gaaagcaaatagtctatggt

SEQ ID NO: 699 - DNA, 20 bp, synthetic construct
  source 1..20: mol_type = other DNA
tgaaagcaaatagtctatgg

SEQ ID NO: 700 - DNA, 20 bp, synthetic construct
  source 1..20: mol_type = other DNA
tttgaaagcaaatagtctat

SEQ ID NO: 701 - DNA, 20 bp, synthetic construct
  source 1..20: mol_type = other DNA
ctttgaaagcaaatagtcta

SEQ ID NO: 702 - DNA, 20 bp, synthetic construct
  source 1..20: mol_type = other DNA
ttctttgaaagcaaatagtc

SEQ ID NO: 703 - DNA, 20 bp, synthetic construct
  source 1..20: mol_type = other DNA
attctttgaaagcaaatagt

SEQ ID NO: 704 - DNA, 20 bp, synthetic construct
  source 1..20: mol_type = other DNA
ccattctttgaaagcaaata

SEQ ID NO: 705 - DNA, 20 bp, synthetic construct
  source 1..20: mol_type = other DNA
cccattctttgaaagcaaat

SEQ ID NO: 706 - DNA, 20 bp, synthetic construct
  source 1..20: mol_type = other DNA
ctcccattctttgaaagcaa

SEQ ID NO: 707 - DNA, 20 bp, synthetic construct
  source 1..20: mol_type = other DNA
actcccattctttgaaagca

SEQ ID NO: 708 - DNA, 20 bp, synthetic construct
  source 1..20: mol_type = other DNA
cactcccattctttgaaagc

SEQ ID NO: 709 - DNA, 20 bp, synthetic construct
  source 1..20: mol_type = other DNA
gccactcccattctttgaaa

SEQ ID NO: 710 - DNA, 20 bp, synthetic construct
  source 1..20: mol_type = other DNA
tgccactcccattctttgaa

SEQ ID NO: 711 - DNA, 20 bp, synthetic construct
  source 1..20: mol_type = other DNA
atgatagcattgccactccc

SEQ ID NO: 712 - DNA, 20 bp, synthetic construct
  source 1..20: mol_type = other DNA
gatgatagcattgccactcc

SEQ ID NO: 713 - DNA, 20 bp, synthetic construct
  source 1..20: mol_type = other DNA
tgatgatagcattgccactc

SEQ ID NO: 714 - DNA, 20 bp, synthetic construct
  source 1..20: mol_type = other DNA
atgatgatagcattgccact

SEQ ID NO: 715 - DNA, 20 bp, synthetic construct
  source 1..20: mol_type = other DNA
cgatgatgatagcattgcca

SEQ ID NO: 716 - DNA, 20 bp, synthetic construct
  source 1..20: mol_type = other DNA
acgatgatgatagcattgcc

SEQ ID NO: 717 - DNA, 20 bp, synthetic construct
  source 1..20: mol_type = other DNA
cacgatgatgatagcattgc

SEQ ID NO: 718 - DNA, 20 bp, synthetic construct
  source 1..20: mol_type = other DNA
ccacgatgatgatagcattg

SEQ ID NO: 719 - DNA, 20 bp, synthetic construct
  source 1..20: mol_type = other DNA
agagactcagccgcaccccc

SEQ ID NO: 720 - DNA, 20 bp, synthetic construct
  source 1..20: mol_type = other DNA
cagagactcagccgcacccc

SEQ ID NO: 721 - DNA, 20 bp, synthetic construct
  source 1..20: mol_type = other DNA
ccaggcatggagctcagaga

SEQ ID NO: 722 - DNA, 20 bp, synthetic construct
  source 1..20: mol_type = other DNA
ggagaggatgctggatccag

SEQ ID NO: 723 - DNA, 20 bp, synthetic construct
  source 1..20: mol_type = other DNA
gcggagaggatgctggatcc

SEQ ID NO: 724 - DNA, 20 bp, synthetic construct
  source 1..20: mol_type = other DNA
ggcggagaggatgctggatc

SEQ ID NO: 725 - DNA, 20 bp, synthetic construct
  source 1..20: mol_type = other DNA
agggcggagaggatgctgga

SEQ ID NO: 726 - DNA, 20 bp, synthetic construct
  source 1..20: mol_type = other DNA
gagggcggagaggatgctgg

SEQ ID NO: 727 - DNA, 20 bp, synthetic construct
  source 1..20: mol_type = other DNA
ggagggcggagaggatgctg

SEQ ID NO: 728 - DNA, 20 bp, synthetic construct
  source 1..20: mol_type = other DNA
tggagggcggagaggatgct

SEQ ID NO: 729 - DNA, 20 bp, synthetic construct
  source 1..20: mol_type = other DNA
cctggagggcggagaggatg

SEQ ID NO: 730 - DNA, 20 bp, synthetic construct
  source 1..20: mol_type = other DNA
tcctggagggcggagaggat

SEQ ID NO: 731 - DNA, 20 bp, synthetic construct
  source 1..20: mol_type = other DNA
ggtcctggagggcggagagg

SEQ ID NO: 732 - DNA, 20 bp, synthetic construct
  source 1..20: mol_type = other DNA
aggtcctggagggcggagag

SEQ ID NO: 733 - DNA, 20 bp, synthetic construct
  source 1..20: mol_type = other DNA
gaggtcctggagggcggaga

SEQ ID NO: 734 - DNA, 20 bp, synthetic construct
  source 1..20: mol_type = other DNA
agaggtcctggagggcggag

SEQ ID NO: 735 - DNA, 20 bp, synthetic construct
  source 1..20: mol_type = other DNA
aagaggtcctggagggcgga

SEQ ID NO: 736 - DNA, 20 bp, synthetic construct
  source 1..20: mol_type = other DNA
gaagaggtcctggagggcgg

SEQ ID NO: 737 - DNA, 20 bp, synthetic construct
  source 1..20: mol_type = other DNA
agaagaggtcctggagggcg

SEQ ID NO: 738 - DNA, 20 bp, synthetic construct
  source 1..20: mol_type = other DNA
ggacctattgagccaggtga

SEQ ID NO: 739 - DNA, 20 bp, synthetic construct
  source 1..20: mol_type = other DNA
tggacctattgagccaggtg

SEQ ID NO: 740 - DNA, 20 bp, synthetic construct
  source 1..20: mol_type = other DNA
ttggacctattgagccaggt

SEQ ID NO: 741 - DNA, 20 bp, synthetic construct
  source 1..20: mol_type = other DNA
cttggacctattgagccagg

SEQ ID NO: 742 - DNA, 20 bp, synthetic construct
  source 1..20: mol_type = other DNA
accttggacctattgagcca

SEQ ID NO: 743 - DNA, 20 bp, synthetic construct
  source 1..20: mol_type = other DNA
caccttggacctattgagcc

SEQ ID NO: 744 - DNA, 20 bp, synthetic construct
  source 1..20: mol_type = other DNA
ccaccttggacctattgagc

SEQ ID NO: 745 - DNA, 20 bp, synthetic construct
  source 1..20: mol_type = other DNA
tccaccttggacctattgag

SEQ ID NO: 746 - DNA, 20 bp, synthetic construct
  source 1..20: mol_type = other DNA
tttccaccttggacctattg

SEQ ID NO: 747 - DNA, 20 bp, synthetic construct
  source 1..20: mol_type = other DNA
ttttccaccttggacctatt

SEQ ID NO: 748 - DNA, 20 bp, synthetic construct
  source 1..20: mol_type = other DNA
cttttccaccttggacctat

SEQ ID NO: 749 - DNA, 20 bp, synthetic construct
  source 1..20: mol_type = other DNA
gcttttccaccttggaccta

SEQ ID NO: 750 - DNA, 20 bp, synthetic construct
  source 1..20: mol_type = other DNA
ctgcttttccaccttggacc

SEQ ID NO: 751 - DNA, 20 bp, synthetic construct
  source 1..20: mol_type = other DNA
gctgcttttccaccttggac

SEQ ID NO: 752 - DNA, 20 bp, synthetic construct
  source 1..20: mol_type = other DNA
tagctgcttttccaccttgg

SEQ ID NO: 753 - DNA, 20 bp, synthetic construct
  source 1..20: mol_type = other DNA
tgtagctgcttttccacctt

SEQ ID NO: 754 - DNA, 20 bp, synthetic construct
  source 1..20: mol_type = other DNA
ctgtagctgcttttccacct

SEQ ID NO: 755 - DNA, 20 bp, synthetic construct
  source 1..20: mol_type = other DNA
acctgtagctgcttttccac

SEQ ID NO: 756 - DNA, 20 bp, synthetic construct
  source 1..20: mol_type = other DNA
gacctgtagctgcttttcca

SEQ ID NO: 757 - DNA, 20 bp, synthetic construct
  source 1..20: mol_type = other DNA
atgacctgtagctgcttttc

SEQ ID NO: 758 - DNA, 20 bp, synthetic construct
  source 1..20: mol_type = other DNA
gatgacctgtagctgctttt

SEQ ID NO: 759 - DNA, 20 bp, synthetic construct
  source 1..20: mol_type = other DNA
agatgacctgtagctgcttt

SEQ ID NO: 760 - DNA, 20 bp, synthetic construct
  source 1..20: mol_type = other DNA
tgagatgacctgtagctgct

SEQ ID NO: 761 - DNA, 20 bp, synthetic construct
  source 1..20: mol_type = other DNA
ctgagatgacctgtagctgc

SEQ ID NO: 762 - DNA, 20 bp, synthetic construct
  source 1..20: mol_type = other DNA
cactgagatgacctgtagct

SEQ ID NO: 763 - DNA, 20 bp, synthetic construct
  source 1..20: mol_type = other DNA
gcactgagatgacctgtagc

SEQ ID NO: 764 - DNA, 20 bp, synthetic construct
  source 1..20: mol_type = other DNA
gagcactgagatgacctgta

SEQ ID NO: 765 - DNA, 20 bp, synthetic construct
  source 1..20: mol_type = other DNA
ggagcactgagatgacctgt

SEQ ID NO: 766 - DNA, 20 bp, synthetic construct
  source 1..20: mol_type = other DNA
ctggagcactgagatgacct

SEQ ID NO: 767 - DNA, 20 bp, synthetic construct
  source 1..20: mol_type = other DNA
actggagcactgagatgacc

SEQ ID NO: 768 - DNA, 20 bp, synthetic construct
  source 1..20: mol_type = other DNA
ggacaggacccactggagca

SEQ ID NO: 769 - DNA, 20 bp, synthetic construct
  source 1..20: mol_type = other DNA
aggacaggacccactggagc

SEQ ID NO: 770 - DNA, 20 bp, synthetic construct
  source 1..20: mol_type = other DNA
gaaggacaggacccactgga

SEQ ID NO: 771 - DNA, 20 bp, synthetic construct
  source 1..20: mol_type = other DNA
ggaaggacaggacccactgg

SEQ ID NO: 772 - DNA, 20 bp, synthetic construct
  source 1..20: mol_type = other DNA
aaggaaggacaggacccact

SEQ ID NO: 773 - DNA, 20 bp, synthetic construct
  source 1..20: mol_type = other DNA
caaggaaggacaggacccac

SEQ ID NO: 774 - DNA, 20 bp, synthetic construct
  source 1..20: mol_type = other DNA
acaaggaaggacaggaccca

SEQ ID NO: 775 - DNA, 20 bp, synthetic construct
  source 1..20: mol_type = other DNA
gtacaaggaaggacaggacc

SEQ ID NO: 776 - DNA, 20 bp, synthetic construct
  source 1..20: mol_type = other DNA
agtacaaggaaggacaggac

SEQ ID NO: 777 - DNA, 20 bp, synthetic construct
  source 1..20: mol_type = other DNA
cagtacaaggaaggacagga

SEQ ID NO: 778 - DNA, 20 bp, synthetic construct
  source 1..20: mol_type = other DNA
ccagtacaaggaaggacagg

SEQ ID NO: 779 - DNA, 20 bp, synthetic construct
  source 1..20: mol_type = other DNA
tcccagtacaaggaaggaca

SEQ ID NO: 780 - DNA, 20 bp, synthetic construct
  source 1..20: mol_type = other DNA
ctcccagtacaaggaaggac

SEQ ID NO: 781 - DNA, 20 bp, synthetic construct
  source 1..20: mol_type = other DNA
cactcccagtacaaggaagg

SEQ ID NO: 782 - DNA, 20 bp, synthetic construct
  source 1..20: mol_type = other DNA
ccactcccagtacaaggaag

SEQ ID NO: 783 - DNA, 20 bp, synthetic construct
  source 1..20: mol_type = other DNA
ggccactcccagtacaagga

SEQ ID NO: 784 - DNA, 20 bp, synthetic construct
  source 1..20: mol_type = other DNA
aggccactcccagtacaagg

SEQ ID NO: 785 - DNA, 20 bp, synthetic construct
  source 1..20: mol_type = other DNA
gcaggccactcccagtacaa

SEQ ID NO: 786 - DNA, 20 bp, synthetic construct
  source 1..20: mol_type = other DNA
tgcaggccactcccagtaca

SEQ ID NO: 787 - DNA, 20 bp, synthetic construct
  source 1..20: mol_type = other DNA
actgcaggccactcccagta

SEQ ID NO: 788 - DNA, 20 bp, synthetic construct
  source 1..20: mol_type = other DNA
cactgcaggccactcccagt

SEQ ID NO: 789 - DNA, 20 bp, synthetic construct
  source 1..20: mol_type = other DNA
ggcactgcaggccactccca

SEQ ID NO: 790 - DNA, 20 bp, synthetic construct
  source 1..20: mol_type = other DNA
tggcactgcaggccactccc

SEQ ID NO: 791 - DNA, 20 bp, synthetic construct
  source 1..20: mol_type = other DNA
atggcactgcaggccactcc

SEQ ID NO: 792 - DNA, 20 bp, synthetic construct
  source 1..20: mol_type = other DNA
ggatggcactgcaggccact

SEQ ID NO: 793 - DNA, 20 bp, synthetic construct
  source 1..20: mol_type = other DNA
aggatggcactgcaggccac

SEQ ID NO: 794 - DNA, 20 bp, synthetic construct
  source 1..20: mol_type = other DNA
gaggatggcactgcaggcca

SEQ ID NO: 795 - DNA, 20 bp, synthetic construct
  source 1..20: mol_type = other DNA
tgaggatggcactgcaggcc

SEQ ID NO: 796 - DNA, 20 bp, synthetic construct
  source 1..20: mol_type = other DNA
catgaggatggcactgcagg

SEQ ID NO: 797 - DNA, 20 bp, synthetic construct
  source 1..20: mol_type = other DNA
acatgaggatggcactgcag

SEQ ID NO: 798 - DNA, 20 bp, synthetic construct
  source 1..20: mol_type = other DNA
tacatgaggatggcactgca

SEQ ID NO: 799 - DNA, 20 bp, synthetic construct
  source 1..20: mol_type = other DNA
atgtacatgaggatggcact

SEQ ID NO: 800 - DNA, 20 bp, synthetic construct
  source 1..20: mol_type = other DNA
tatgtacatgaggatggcac

SEQ ID NO: 801 - DNA, 20 bp, synthetic construct
  source 1..20: mol_type = other DNA
atatgtacatgaggatggca

SEQ ID NO: 802 - DNA, 20 bp, synthetic construct
  source 1..20: mol_type = other DNA
aatatgtacatgaggatggc

SEQ ID NO: 803 - DNA, 20 bp, synthetic construct
  source 1..20: mol_type = other DNA
agaatatgtacatgaggatg

SEQ ID NO: 804 - DNA, 20 bp, synthetic construct
  source 1..20: mol_type = other DNA
cagaatatgtacatgaggat

SEQ ID NO: 805 - DNA, 20 bp, synthetic construct
  source 1..20: mol_type = other DNA
gcagaatatgtacatgagga

SEQ ID NO: 806 - DNA, 20 bp, synthetic construct
  source 1..20: mol_type = other DNA
tgcagaatatgtacatgagg

SEQ ID NO: 807 - DNA, 20 bp, synthetic construct
  source 1..20: mol_type = other DNA
cacagcgatgagccagcaat

SEQ ID NO: 808 - DNA, 20 bp, synthetic construct
  source 1..20: mol_type = other DNA
gcacagcgatgagccagcaa

SEQ ID NO: 809 - DNA, 20 bp, synthetic construct
  source 1..20: mol_type = other DNA
gagcacagcgatgagccagc

SEQ ID NO: 810 - DNA, 20 bp, synthetic construct
  source 1..20: mol_type = other DNA
agagcacagcgatgagccag

SEQ ID NO: 811 - DNA, 20 bp, synthetic construct
  source 1..20: mol_type = other DNA
gtagagcacagcgatgagcc

SEQ ID NO: 812 - DNA, 20 bp, synthetic construct
  source 1..20: mol_type = other DNA
agtagagcacagcgatgagc

SEQ ID NO: 813 - DNA, 20 bp, synthetic construct
  source 1..20: mol_type = other DNA
aagtagagcacagcgatgag

SEQ ID NO: 814 - DNA, 20 bp, synthetic construct
  source 1..20: mol_type = other DNA
gaagtagagcacagcgatga

SEQ ID NO: 815 - DNA, 20 bp, synthetic construct
  source 1..20: mol_type = other DNA
gtgaagtagagcacagcgat

SEQ ID NO: 816 - DNA, 20 bp, synthetic construct
  source 1..20: mol_type = other DNA
agtgaagtagagcacagcga

SEQ ID NO: 817 - DNA, 20 bp, synthetic construct
  source 1..20: mol_type = other DNA
aagtgaagtagagcacagcg

SEQ ID NO: 818 - DNA, 20 bp, synthetic construct
  source 1..20: mol_type = other DNA
caagtgaagtagagcacagc

SEQ ID NO: 819 - DNA, 20 bp, synthetic construct
  source 1..20: mol_type = other DNA
gccaagtgaagtagagcaca

SEQ ID NO: 820 - DNA, 20 bp, synthetic construct
  source 1..20: mol_type = other DNA
agccaagtgaagtagagcac

SEQ ID NO: 821 - DNA, 20 bp, synthetic construct
  source 1..20: mol_type = other DNA
ccagccaagtgaagtagagc

SEQ ID NO: 822 - DNA, 20 bp, synthetic construct
  source 1..20: mol_type = other DNA
accagccaagtgaagtagag

SEQ ID NO: 823 - DNA, 20 bp, synthetic construct
  source 1..20: mol_type = other DNA
acaccagccaagtgaagtag

SEQ ID NO: 824 - DNA, 20 bp, synthetic construct
  source 1..20: mol_type = other DNA
aacaccagccaagtgaagta

SEQ ID NO: 825 - DNA, 20 bp, synthetic construct
  source 1..20: mol_type = other DNA
caaacaccagccaagtgaag

SEQ ID NO: 826 - DNA, 20 bp, synthetic construct
  source 1..20: mol_type = other DNA
tcaaacaccagccaagtgaa

SEQ ID NO: 827 - DNA, 20 bp, synthetic construct
  source 1..20: mol_type = other DNA
agtcaaacaccagccaagtg

SEQ ID NO: 828 - DNA, 20 bp, synthetic construct
  source 1..20: mol_type = other DNA
cagtcaaacaccagccaagt

SEQ ID NO: 829 - DNA, 20 bp, synthetic construct
  source 1..20: mol_type = other DNA
tccagtcaaacaccagccaa

SEQ ID NO: 830 - DNA, 20 bp, synthetic construct
  source 1..20: mol_type = other DNA
ttccagtcaaacaccagcca

SEQ ID NO: 831 - DNA, 20 bp, synthetic construct
  source 1..20: mol_type = other DNA
tgttccagtcaaacaccagc

SEQ ID NO: 832 - DNA, 20 bp, synthetic construct
  source 1..20: mol_type = other DNA
gtgttccagtcaaacaccag

SEQ ID NO: 833 - DNA, 20 bp, synthetic construct
  source 1..20: mol_type = other DNA
gtgtgttccagtcaaacacc

SEQ ID NO: 834 - DNA, 20 bp, synthetic construct
  source 1..20: mol_type = other DNA
ggtgtgttccagtcaaacac

SEQ ID NO: 835 - DNA, 20 bp, synthetic construct
  source 1..20: mol_type = other DNA
tgggtgtgttccagtcaaac

SEQ ID NO: 836 - DNA, 20 bp, synthetic construct
  source 1..20: mol_type = other DNA
ttgggtgtgttccagtcaaa

SEQ ID NO: 837 - DNA, 20 bp, synthetic construct
  source 1..20: mol_type = other DNA
tcttgggtgtgttccagtca

SEQ ID NO: 838 - DNA, 20 bp, synthetic construct
  source 1..20: mol_type = other DNA
ttcttgggtgtgttccagtc

SEQ ID NO: 839 - DNA, 20 bp, synthetic construct
  source 1..20: mol_type = other DNA
actgtgacctcctgccacct

SEQ ID NO: 840 - DNA, 20 bp, synthetic construct
  source 1..20: mol_type = other DNA
cactgtgacctcctgccacc

SEQ ID NO: 841 - DNA, 20 bp, synthetic construct
  source 1..20: mol_type = other DNA
cccactgtgacctcctgcca

SEQ ID NO: 842 - DNA, 20 bp, synthetic construct
  source 1..20: mol_type = other DNA
acccactgtgacctcctgcc

SEQ ID NO: 843 - DNA, 20 bp, synthetic construct
  source 1..20: mol_type = other DNA
ggacccactgtgacctcctg

SEQ ID NO: 844 - DNA, 20 bp, synthetic construct
  source 1..20: mol_type = other DNA
cggacccactgtgacctcct

SEQ ID NO: 845 - DNA, 20 bp, synthetic construct
  source 1..20: mol_type = other DNA
tcggacccactgtgacctcc

SEQ ID NO: 846 - DNA, 20 bp, synthetic construct
  source 1..20: mol_type = other DNA
agcccagtttcggacccact

SEQ ID NO: 847 - DNA, 20 bp, synthetic construct
  source 1..20: mol_type = other DNA
cagcccagtttcggacccac

SEQ ID NO: 848 - DNA, 20 bp, synthetic construct
  source 1..20: mol_type = other DNA
cacagcccagtttcggaccc

SEQ ID NO: 849 - DNA, 20 bp, synthetic construct
  source 1..20: mol_type = other DNA
acacagcccagtttcggacc

SEQ ID NO: 850 - DNA, 20 bp, synthetic construct
  source 1..20: mol_type = other DNA
ccacacagcccagtttcgga

SEQ ID NO: 851 - DNA, 20 bp, synthetic construct
  source 1..20: mol_type = other DNA
gccacacagcccagtttcgg

SEQ ID NO: 852 - DNA, 20 bp, synthetic construct
  source 1..20: mol_type = other DNA
cgccacacagcccagtttcg

SEQ ID NO: 853 - DNA, 20 bp, synthetic construct
  source 1..20: mol_type = other DNA
aagtagtctcgaaagtagcg

SEQ ID NO: 854 - DNA, 20 bp, synthetic construct
  source 1..20: mol_type = other DNA
aaagtagtctcgaaagtagc

SEQ ID NO: 855 - DNA, 20 bp, synthetic construct
  source 1..20: mol_type = other DNA
ggaaagtagtctcgaaagta

SEQ ID NO: 856 - DNA, 20 bp, synthetic construct
  source 1..20: mol_type = other DNA
gggaaagtagtctcgaaagt

SEQ ID NO: 857 - DNA, 20 bp, synthetic construct
  source 1..20: mol_type = other DNA
tgggaaagtagtctcgaaag

SEQ ID NO: 858 - DNA, 20 bp, synthetic construct
  source 1..20: mol_type = other DNA
gatgggaaagtagtctcgaa

SEQ ID NO: 859 - DNA, 20 bp, synthetic construct
  source 1..20: mol_type = other DNA
ggatgggaaagtagtctcga

SEQ ID NO: 860 - DNA, 20 bp, synthetic construct
  source 1..20: mol_type = other DNA
ggtggtatccaaagatatag

SEQ ID NO: 861 - DNA, 20 bp, synthetic construct
  source 1..20: mol_type = other DNA
gggtggtatccaaagatata

SEQ ID NO: 862 - DNA, 20 bp, synthetic construct
  source 1..20: mol_type = other DNA
ttgcagaaggcacccaggcc

SEQ ID NO: 863 - DNA, 20 bp, synthetic construct
  source 1..20: mol_type = other DNA
gttgcagaaggcacccaggc

SEQ ID NO: 864 - DNA, 20 bp, synthetic construct
  source 1..20: mol_type = other DNA
cttctgtggcctctgtgctg

SEQ ID NO: 865 - DNA, 20 bp, synthetic construct
  source 1..20: mol_type = other DNA
tgtcggaggagaagaggcct

SEQ ID NO: 866 - DNA, 20 bp, synthetic construct
  source 1..20: mol_type = other DNA
ggtgtcggaggagaagaggc

SEQ ID NO: 867 - DNA, 20 bp, synthetic construct
  source 1..20: mol_type = other DNA
aggtgtcggaggagaagagg

SEQ ID NO: 868 - DNA, 20 bp, synthetic construct
  source 1..20: mol_type = other DNA
caggtgtcggaggagaagag

SEQ ID NO: 869 - DNA, 20 bp, synthetic construct
  source 1..20: mol_type = other DNA
cccaggtgtcggaggagaag

SEQ ID NO: 870 - DNA, 20 bp, synthetic construct
  source 1..20: mol_type = other DNA
ccccaggtgtcggaggagaa

SEQ ID NO: 871 - DNA, 20 bp, synthetic construct
  source 1..20: mol_type = other DNA
gcccccaggtgtcggaggag

SEQ ID NO: 872 - DNA, 20 bp, synthetic construct
  source 1..20: mol_type = other DNA
agcccccaggtgtcggagga

SEQ ID NO: 873 - DNA, 20 bp, synthetic construct
  source 1..20: mol_type = other DNA
cagcccccaggtgtcggagg

SEQ ID NO: 874 - DNA, 20 bp, synthetic construct
  source 1..20: mol_type = other DNA
accagcccccaggtgtcgga

SEQ ID NO: 875 - DNA, 20 bp, synthetic construct
  source 1..20: mol_type = other DNA
aacagtggtgatgggcttgg

SEQ ID NO: 876 - DNA, 20 bp, synthetic construct
  source 1..20: mol_type = other DNA
caacagtggtgatgggcttg

SEQ ID NO: 877 - DNA, 20 bp, synthetic construct
  source 1..20: mol_type = other DNA
catggtgtggtacaggtcga

SEQ ID NO: 878 - DNA, 20 bp, synthetic construct
  source 1..20: mol_type = other DNA
acatggtgtggtacaggtcg

SEQ ID NO: 879 - DNA, 20 bp, synthetic construct
  source 1..20: mol_type = other DNA
tacatggtgtggtacaggtc

SEQ ID NO: 880 - DNA, 20 bp, synthetic construct
  source 1..20: mol_type = other DNA
gtacatggtgtggtacaggt

SEQ ID NO: 881 - DNA, 20 bp, synthetic construct
  source 1..20: mol_type = other DNA
atgtacatggtgtggtacag

SEQ ID NO: 882 - DNA, 20 bp, synthetic construct
  source 1..20: mol_type = other DNA
catgtacatggtgtggtaca

SEQ ID NO: 883 - DNA, 20 bp, synthetic construct
  source 1..20: mol_type = other DNA
tccatgtacatggtgtggta

SEQ ID NO: 884 - DNA, 20 bp, synthetic construct
  source 1..20: mol_type = other DNA
ctccatgtacatggtgtggt

SEQ ID NO: 885 - DNA, 20 bp, synthetic construct
  source 1..20: mol_type = other DNA
cctccatgtacatggtgtgg

SEQ ID NO: 886 - DNA, 20 bp, synthetic construct
  source 1..20: mol_type = other DNA
ggcctccatgtacatggtgt

SEQ ID NO: 887 - DNA, 20 bp, synthetic construct
  source 1..20: mol_type = other DNA
gggcctccatgtacatggtg

SEQ ID NO: 888 - DNA, 20 bp, synthetic construct
  source 1..20: mol_type = other DNA
agggcctccatgtacatggt

SEQ ID NO: 889 - DNA, 20 bp, synthetic construct
  source 1..20: mol_type = other DNA
tcgaagagcttcaccagggc

SEQ ID NO: 890 - DNA, 20 bp, synthetic construct
  source 1..20: mol_type = other DNA
gtcgaagagcttcaccaggg

SEQ ID NO: 891 - DNA, 20 bp, synthetic construct
  source 1..20: mol_type = other DNA
ttgtcgaagagcttcaccag

SEQ ID NO: 892 - DNA, 20 bp, synthetic construct
  source 1..20: mol_type = other DNA
cttgtcgaagagcttcacca

SEQ ID NO: 893 - DNA, 20 bp, synthetic construct
  source 1..20: mol_type = other DNA
gcttgtcgaagagcttcacc

SEQ ID NO: 894 - DNA, 20 bp, synthetic construct
  source 1..20: mol_type = other DNA
tgcttgtcgaagagcttcac

SEQ ID NO: 895 - DNA, 20 bp, synthetic construct
  source 1..20: mol_type = other DNA
tgtgcttgtcgaagagcttc

SEQ ID NO: 896 - DNA, 20 bp, synthetic construct
  source 1..20: mol_type = other DNA
ttgtgcttgtcgaagagctt

SEQ ID NO: 897 - DNA, 20 bp, synthetic construct
  source 1..20: mol_type = other DNA
cttgtgcttgtcgaagagct

SEQ ID NO: 898 - DNA, 20 bp, synthetic construct
  source 1..20: mol_type = other DNA
cttggtcttgtgcttgtcga

SEQ ID NO: 899 - DNA, 20 bp, synthetic construct
  source 1..20: mol_type = other DNA
acttggtcttgtgcttgtcg

SEQ ID NO: 900 - DNA, 20 bp, synthetic construct
  source 1..20: mol_type = other DNA
aacttggtcttgtgcttgtc

SEQ ID NO: 901 - DNA, 20 bp, synthetic construct
  source 1..20: mol_type = other DNA
cgaacttggtcttgtgcttg

SEQ ID NO: 902 - DNA, 20 bp, synthetic construct
  source 1..20: mol_type = other DNA
ccgaacttggtcttgtgctt

SEQ ID NO: 903 - DNA, 20 bp, synthetic construct
  source 1..20: mol_type = other DNA
gccgaacttggtcttgtgct

SEQ ID NO: 904 - DNA, 20 bp, synthetic construct
  source 1..20: mol_type = other DNA
ggccgaacttggtcttgtgc

SEQ ID NO: 905 - DNA, 20 bp, synthetic construct
  source 1..20: mol_type = other DNA
gaggccgaacttggtcttgt

SEQ ID NO: 906 - DNA, 20 bp, synthetic construct
  source 1..20: mol_type = other DNA
ggaggccgaacttggtcttg

SEQ ID NO: 907 - DNA, 20 bp, synthetic construct
  source 1..20: mol_type = other DNA
acctccaggacctcagtctc

SEQ ID NO: 908 - DNA, 20 bp, synthetic construct
  source 1..20: mol_type = other DNA
cacctccaggacctcagtct

SEQ ID NO: 909 - DNA, 20 bp, synthetic construct
  source 1..20: mol_type = other DNA
tcacctccaggacctcagtc

SEQ ID NO: 910 - DNA, 20 bp, synthetic construct
  source 1..20: mol_type = other DNA
gttcacctccaggacctcag

SEQ ID NO: 911 - DNA, 20 bp, synthetic construct
  source 1..20: mol_type = other DNA
agttcacctccaggacctca

SEQ ID NO: 912 - DNA, 20 bp, synthetic construct
  source 1..20: mol_type = other DNA
cagttcacctccaggacctc

SEQ ID NO: 913 - DNA, 20 bp, synthetic construct
  source 1..20: mol_type = other DNA
ctcagttcacctccaggacc

SEQ ID NO: 914 - DNA, 20 bp, synthetic construct
  source 1..20: mol_type = other DNA
gctcagttcacctccaggac

SEQ ID NO: 915 - DNA, 20 bp, synthetic construct
  source 1..20: mol_type = other DNA
ggctcagttcacctccagga

SEQ ID NO: 916 - DNA, 20 bp, synthetic construct
  source 1..20: mol_type = other DNA
tggctcagttcacctccagg

SEQ ID NO: 917 - DNA, 20 bp, synthetic construct
  source 1..20: mol_type = other DNA
ttgtaatggtttagcaaaat

SEQ ID NO: 918 - DNA, 20 bp, synthetic construct
  source 1..20: mol_type = other DNA
attgtaatggtttagcaaaa

SEQ ID NO: 919 - DNA, 20 bp, synthetic construct
  source 1..20: mol_type = other DNA
cattgtaatggtttagcaaa

SEQ ID NO: 920 - DNA, 20 bp, synthetic construct
  source 1..20: mol_type = other DNA
acattgtaatggtttagcaa

SEQ ID NO: 921 - DNA, 20 bp, synthetic construct
  source 1..20: mol_type = other DNA
taacattgtaatggtttagc

SEQ ID NO: 922 - DNA, 20 bp, synthetic construct
  source 1..20: mol_type = other DNA
ctaacattgtaatggtttag

SEQ ID NO: 923 - DNA, 20 bp, synthetic construct
  source 1..20: mol_type = other DNA
cctaacattgtaatggttta

SEQ ID NO: 924 - DNA, 20 bp, synthetic construct
  source 1..20: mol_type = other DNA
acctaacattgtaatggttt

SEQ ID NO: 925 - DNA, 20 bp, synthetic construct
  source 1..20: mol_type = other DNA
agacctaacattgtaatggt

SEQ ID NO: 926 - DNA, 20 bp, synthetic construct
  source 1..20: mol_type = other DNA
aagacctaacattgtaatgg

SEQ ID NO: 927 - DNA, 20 bp, synthetic construct
  source 1..20: mol_type = other DNA
aaagacctaacattgtaatg

SEQ ID NO: 928 - DNA, 20 bp, synthetic construct
  source 1..20: mol_type = other DNA
aaaagacctaacattgtaat

SEQ ID NO: 929 - DNA, 20 bp, synthetic construct
  source 1..20: mol_type = other DNA
aaaaaagacctaacattgta

SEQ ID NO: 930 - DNA, 20 bp, synthetic construct
  source 1..20: mol_type = other DNA
taaaaaagacctaacattgt

SEQ ID NO: 931 - DNA, 20 bp, synthetic construct
  source 1..20: mol_type = other DNA
cttaaaaaagacctaacatt

SEQ ID NO: 932 - DNA, 20 bp, synthetic construct
  source 1..20: mol_type = other DNA
tcttaaaaaagacctaacat

SEQ ID NO: 933 - DNA, 20 bp, synthetic construct
  source 1..20: mol_type = other DNA
ctccaactcctccccttggc

SEQ ID NO: 934 - DNA, 20 bp, synthetic construct
  source 1..20: mol_type = other DNA
tctccaactcctccccttgg

SEQ ID NO: 935 - DNA, 20 bp, synthetic construct
  source 1..20: mol_type = other DNA
gctctccaactcctcccctt

SEQ ID NO: 936 - DNA, 20 bp, synthetic construct
  source 1..20: mol_type = other DNA
tgctctccaactcctcccct

SEQ ID NO: 937 - DNA, 20 bp, synthetic construct
  source 1..20: mol_type = other DNA
cattccagatgcctactact

SEQ ID NO: 938 - DNA, 20 bp, synthetic construct
  source 1..20: mol_type = other DNA
gcattccagatgcctactac

SEQ ID NO: 939 - DNA, 20 bp, synthetic construct
  source 1..20: mol_type = other DNA
agcattccagatgcctacta

SEQ ID NO: 940 - DNA, 20 bp, synthetic construct
  source 1..20: mol_type = other DNA
gagcattccagatgcctact

SEQ ID NO: 941 - DNA, 20 bp, synthetic construct
  source 1..20: mol_type = other DNA
cctggaggccagtccaggct

SEQ ID NO: 942 - DNA, 20 bp, synthetic construct
  source 1..20: mol_type = other DNA
tcctggaggccagtccaggc

SEQ ID NO: 943 - DNA, 20 bp, synthetic construct
  source 1..20: mol_type = other DNA
catcctggaggccagtccag

SEQ ID NO: 944 - DNA, 20 bp, synthetic construct
  source 1..20: mol_type = other DNA
tcatcctggaggccagtcca

SEQ ID NO: 945 - DNA, 20 bp, synthetic construct
  source 1..20: mol_type = other DNA
cctcatcctggaggccagtc

SEQ ID NO: 946 - DNA, 20 bp, synthetic construct
  source 1..20: mol_type = other DNA
tcctcatcctggaggccagt

SEQ ID NO: 947 - DNA, 20 bp, synthetic construct
  source 1..20: mol_type = other DNA
atcctcatcctggaggccag

SEQ ID NO: 948 - DNA, 20 bp, synthetic construct
  source 1..20: mol_type = other DNA
catcctcatcctggaggcca

SEQ ID NO: 949 - DNA, 20 bp, synthetic construct
  source 1..20: mol_type = other DNA
cccatcctcatcctggaggc

SEQ ID NO: 950 - DNA, 20 bp, synthetic construct
  source 1..20: mol_type = other DNA
ccccatcctcatcctggagg

SEQ ID NO: 951 - DNA, 20 bp, synthetic construct
  source 1..20: mol_type = other DNA
acccccatcctcatcctgga

SEQ ID NO: 952 - DNA, 20 bp, synthetic construct
  source 1..20: mol_type = other DNA
cacccccatcctcatcctgg

SEQ ID NO: 953 - DNA, 20 bp, synthetic construct
  source 1..20: mol_type = other DNA
ccacccccatcctcatcctg

SEQ ID NO: 954 - DNA, 20 bp, synthetic construct
  source 1..20: mol_type = other DNA
tgccacccccatcctcatcc

SEQ ID NO: 955 - DNA, 20 bp, synthetic construct
  source 1..20: mol_type = other DNA
ttgccacccccatcctcatc

SEQ ID NO: 956 - DNA, 20 bp, synthetic construct
  source 1..20: mol_type = other DNA
attgccacccccatcctcat

SEQ ID NO: 957 - DNA, 20 bp, synthetic construct
  source 1..20: mol_type = other DNA
tcattgccacccccatcctc

SEQ ID NO: 958 - DNA, 20 bp, synthetic construct
  source 1..20: mol_type = other DNA
gtcattgccacccccatcct

SEQ ID NO: 959 - DNA, 20 bp, synthetic construct
  source 1..20: mol_type = other DNA
tgtcattgccacccccatcc

SEQ ID NO: 960 - DNA, 20 bp, synthetic construct
  source 1..20: mol_type = other DNA
ggtgtcattgccacccccat

SEQ ID NO: 961 - DNA, 20 bp, synthetic construct
  source 1..20: mol_type = other DNA
gctcatggtggcggcatcct

SEQ ID NO: 962 - DNA, 20 bp, synthetic construct
  source 1..20: mol_type = other DNA
agctcatggtggcggcatcc

SEQ ID NO: 963 - DNA, 20 bp, synthetic construct
  source 1..20: mol_type = other DNA
ctagctcatggtggcggcat

SEQ ID NO: 964 - DNA, 20 bp, synthetic construct
  source 1..20: mol_type = other DNA
cctagctcatggtggcggca

SEQ ID NO: 965 - DNA, 20 bp, synthetic construct
  source 1..20: mol_type = other DNA
cacctagctcatggtggcgg

SEQ ID NO: 966 - DNA, 20 bp, synthetic construct
  source 1..20: mol_type = other DNA
ccacctagctcatggtggcg

SEQ ID NO: 967 - DNA, 20 bp, synthetic construct
  source 1..20: mol_type = other DNA
ctccacctagctcatggtgg

SEQ ID NO: 968 - DNA, 20 bp, synthetic construct
  source 1..20: mol_type = other DNA
actccacctagctcatggtg

SEQ ID NO: 969 - DNA, 20 bp, synthetic construct
  source 1..20: mol_type = other DNA
tactccacctagctcatggt

SEQ ID NO: 970 - DNA, 20 bp, synthetic construct
  source 1..20: mol_type = other DNA
gttactccacctagctcatg

SEQ ID NO: 971 - DNA, 20 bp, synthetic construct
  source 1..20: mol_type = other DNA
agttactccacctagctcat

SEQ ID NO: 972 - DNA, 20 bp, synthetic construct
  source 1..20: mol_type = other DNA
cagttactccacctagctca

SEQ ID NO: 973 - DNA, 20 bp, synthetic construct
  source 1..20: mol_type = other DNA
ccagttactccacctagctc

SEQ ID NO: 974 - DNA, 20 bp, synthetic construct
  source 1..20: mol_type = other DNA
aaccagttactccacctagc

SEQ ID NO: 975 - DNA, 20 bp, synthetic construct
  source 1..20: mol_type = other DNA
aaaccagttactccacctag

SEQ ID NO: 976 - DNA, 20 bp, synthetic construct
  source 1..20: mol_type = other DNA
aaaaaccagttactccacct

SEQ ID NO: 977 - DNA, 20 bp, synthetic construct
  source 1..20: mol_type = other DNA
gaaaaaccagttactccacc

SEQ ID NO: 978 - DNA, 20 bp, synthetic construct
  source 1..20: mol_type = other DNA
aagaaaaaccagttactcca

SEQ ID NO: 979 - DNA, 20 bp, synthetic construct
  source 1..20: mol_type = other DNA
caagaaaaaccagttactcc

SEQ ID NO: 980 - DNA, 20 bp, synthetic construct
  source 1..20: mol_type = other DNA
cccaagaaaaaccagttact

SEQ ID NO: 981 - DNA, 20 bp, synthetic construct
  source 1..20: mol_type = other DNA
acccaagaaaaaccagttac

SEQ ID NO: 982 - DNA, 20 bp, synthetic construct
  source 1..20: mol_type = other DNA
cacccaagaaaaaccagtta

SEQ ID NO: 983 - DNA, 20 bp, synthetic construct
  source 1..20: mol_type = other DNA
ccacccaagaaaaaccagtt

SEQ ID NO: 984 - DNA, 20 bp, synthetic construct
  source 1..20: mol_type = other DNA
agccacccaagaaaaaccag

SEQ ID NO: 985 - DNA, 20 bp, synthetic construct
  source 1..20: mol_type = other DNA
cagccacccaagaaaaacca

SEQ ID NO: 986 - DNA, 20 bp, synthetic construct
  source 1..20: mol_type = other DNA
atcagccacccaagaaaaac

SEQ ID NO: 987 - DNA, 20 bp, synthetic construct
  source 1..20: mol_type = other DNA
catcagccacccaagaaaaa

SEQ ID NO: 988 - DNA, 20 bp, synthetic construct
  source 1..20: mol_type = other DNA
tcatcagccacccaagaaaa

SEQ ID NO: 989 - DNA, 20 bp, synthetic construct
  source 1..20: mol_type = other DNA
tgtcatcagccacccaagaa

SEQ ID NO: 990 - DNA, 20 bp, synthetic construct
  source 1..20: mol_type = other DNA
atgtcatcagccacccaaga

SEQ ID NO: 991 - DNA, 20 bp, synthetic construct
  source 1..20: mol_type = other DNA
ccatgtcatcagccacccaa

SEQ ID NO: 992 - DNA, 20 bp, synthetic construct
  source 1..20: mol_type = other DNA
tccatgtcatcagccaccca

SEQ ID NO: 993 - DNA, 20 bp, synthetic construct
  source 1..20: mol_type = other DNA
atccatgtcatcagccaccc

SEQ ID NO: 994 - DNA, 20 bp, synthetic construct
  source 1..20: mol_type = other DNA
catccatgtcatcagccacc

SEQ ID NO: 995 - DNA, 20 bp, synthetic construct
  source 1..20: mol_type = other DNA
tgcatccatgtcatcagcca

SEQ ID NO: 996 - DNA, 20 bp, synthetic construct
  source 1..20: mol_type = other DNA
ctgcatccatgtcatcagcc

SEQ ID NO: 997 - DNA, 20 bp, synthetic construct
  source 1..20: mol_type = other DNA
tgctgcatccatgtcatcag

SEQ ID NO: 998 - DNA, 20 bp, synthetic construct
  source 1..20: mol_type = other DNA
gtgctgcatccatgtcatca

SEQ ID NO: 999 - DNA, 20 bp, synthetic construct
  source 1..20: mol_type = other DNA
ctgtgctgcatccatgtcat

SEQ ID NO: 1000 - DNA, 20 bp, synthetic construct
  source 1..20: mol_type = other DNA
tctgtgctgcatccatgtca

SEQ ID NO: 1001 - DNA, 20 bp, synthetic construct
  source 1..20: mol_type = other DNA
gtctgtgctgcatccatgtc

SEQ ID NO: 1002 - DNA, 20 bp, synthetic construct
  source 1..20: mol_type = other DNA
agtctgtgctgcatccatgt

SEQ ID NO: 1003 - DNA, 20 bp, synthetic construct
  source 1..20: mol_type = other DNA
tgagtctgtgctgcatccat

SEQ ID NO: 1004 - DNA, 20 bp, synthetic construct
  source 1..20: mol_type = other DNA
ctgagtctgtgctgcatcca

SEQ ID NO: 1005 - DNA, 20 bp, synthetic construct
  source 1..20: mol_type = other DNA
gctgagtctgtgctgcatcc

SEQ ID NO: 1006 - DNA, 20 bp, synthetic construct
  source 1..20: mol_type = other DNA
ggctgagtctgtgctgcatc

SEQ ID NO: 1007 - DNA, 20 bp, synthetic construct
  source 1..20: mol_type = other DNA
aggctgagtctgtgctgcat

SEQ ID NO: 1008 - DNA, 20 bp, synthetic construct
  source 1..20: mol_type = other DNA
aaggctgagtctgtgctgca

SEQ ID NO: 1009 - DNA, 20 bp, synthetic construct
  source 1..20: mol_type = other DNA
ccaaggctgagtctgtgctg

SEQ ID NO: 1010 - DNA, 20 bp, synthetic construct
  source 1..20: mol_type = other DNA
gccaaggctgagtctgtgct

SEQ ID NO: 1011 - DNA, 20 bp, synthetic construct
  source 1..20: mol_type = other DNA
aggccaaggctgagtctgtg

SEQ ID NO: 1012 - DNA, 20 bp, synthetic construct
  source 1..20: mol_type = other DNA
caggccaaggctgagtctgt

SEQ ID NO: 1013 - DNA, 20 bp, synthetic construct
  source 1..20: mol_type = other DNA
tccaggccaaggctgagtct

SEQ ID NO: 1014 - DNA, 20 bp, synthetic construct
  source 1..20: mol_type = other DNA
ctccaggccaaggctgagtc

SEQ ID NO: 1015 - DNA, 20 bp, synthetic construct
  source 1..20: mol_type = other DNA
gctccaggccaaggctgagt

SEQ ID NO: 1016 - DNA, 20 bp, synthetic construct
  source 1..20: mol_type = other DNA
tgctccaggccaaggctgag

SEQ ID NO: 1017 - DNA, 20 bp, synthetic construct
  source 1..20: mol_type = other DNA
tgtgctccaggccaaggctg

SEQ ID NO: 1018 - DNA, 20 bp, synthetic construct
  source 1..20: mol_type = other DNA
atgtgctccaggccaaggct

SEQ ID NO: 1019 - DNA, 20 bp, synthetic construct
  source 1..20: mol_type = other DNA
aggtaaactgaggccaccag

SEQ ID NO: 1020 - DNA, 20 bp, synthetic construct
  source 1..20: mol_type = other DNA
gaaggtaaactgaggccacc

SEQ ID NO: 1021 - DNA, 20 bp, synthetic construct
  source 1..20: mol_type = other DNA
ggaaggtaaactgaggccac

SEQ ID NO: 1022 - DNA, 20 bp, synthetic construct
  source 1..20: mol_type = other DNA
tcttcctcacatccagaatc

SEQ ID NO: 1023 - DNA, 20 bp, synthetic construct
  source 1..20: mol_type = other DNA
ctcttcctcacatccagaat

SEQ ID NO: 1024 - DNA, 20 bp, synthetic construct
  source 1..20: mol_type = other DNA
caggccccttctgaagaggg

SEQ ID NO: 1025 - DNA, 20 bp, synthetic construct
  source 1..20: mol_type = other DNA
ccaggccccttctgaagagg

SEQ ID NO: 1026 - DNA, 20 bp, synthetic construct
  source 1..20: mol_type = other DNA
ggccaggccccttctgaaga

SEQ ID NO: 1027 - DNA, 20 bp, synthetic construct
  source 1..20: mol_type = other DNA
aggccaggccccttctgaag

SEQ ID NO: 1028 - DNA, 20 bp, synthetic construct
  source 1..20: mol_type = other DNA
gaaggccaggccccttctga

SEQ ID NO: 1029 - DNA, 20 bp, synthetic construct
  source 1..20: mol_type = other DNA
agaaggccaggccccttctg

SEQ ID NO: 1030 - DNA, 20 bp, synthetic construct
  source 1..20: mol_type = other DNA
cagaaggccaggccccttct

SEQ ID NO: 1031 - DNA, 20 bp, synthetic construct
  source 1..20: mol_type = other DNA
ctcagaaggccaggcccctt

SEQ ID NO: 1032 - DNA, 20 bp, synthetic construct
  source 1..20: mol_type = other DNA
gctcagaaggccaggcccct

SEQ ID NO: 1033 - DNA, 20 bp, synthetic construct
  source 1..20: mol_type = other DNA
ctgctcagaaggccaggccc

SEQ ID NO: 1034 - DNA, 20 bp, synthetic construct
  source 1..20: mol_type = other DNA
gctgctcagaaggccaggcc

SEQ ID NO: 1035 - DNA, 20 bp, synthetic construct
  source 1..20: mol_type = other DNA
ctgctgctcagaaggccagg

SEQ ID NO: 1036 - DNA, 20 bp, synthetic construct
  source 1..20: mol_type = other DNA
tctgctgctcagaaggccag

SEQ ID NO: 1037 - DNA, 20 bp, synthetic construct
  source 1..20: mol_type = other DNA
atctgctgctcagaaggcca

SEQ ID NO: 1038 - DNA, 20 bp, synthetic construct
  source 1..20: mol_type = other DNA
aatctgctgctcagaaggcc

SEQ ID NO: 1039 - DNA, 20 bp, synthetic construct
  source 1..20: mol_type = other DNA
ctaatctgctgctcagaagg

SEQ ID NO: 1040 - DNA, 20 bp, synthetic construct
  source 1..20: mol_type = other DNA
actaatctgctgctcagaag

SEQ ID NO: 1041 - DNA, 20 bp, synthetic construct
  source 1..20: mol_type = other DNA
aactaatctgctgctcagaa

SEQ ID NO: 1042 - DNA, 20 bp, synthetic construct
  source 1..20: mol_type = other DNA
gaactaatctgctgctcaga

SEQ ID NO: 1043 - DNA, 20 bp, synthetic construct
  source 1..20: mol_type = other DNA
ggaactaatctgctgctcag

SEQ ID NO: 1044 - DNA, 20 bp, synthetic construct
  source 1..20: mol_type = other DNA
tggaactaatctgctgctca

SEQ ID NO: 1045 - DNA, 20 bp, synthetic construct
  source 1..20: mol_type = other DNA
ttggaactaatctgctgctc

SEQ ID NO: 1046 - DNA, 20 bp, synthetic construct
  source 1..20: mol_type = other DNA
ctttggaactaatctgctgc

SEQ ID NO: 1047 - DNA, 20 bp, synthetic construct
  source 1..20: mol_type = other DNA
gctttggaactaatctgctg

SEQ ID NO: 1048 - DNA, 20 bp, synthetic construct
  source 1..20: mol_type = other DNA
tgctttggaactaatctgct

SEQ ID NO: 1049 - DNA, 20 bp, synthetic construct
  source 1..20: mol_type = other DNA
ctgctttggaactaatctgc

SEQ ID NO: 1050 - DNA, 20 bp, synthetic construct
  source 1..20: mol_type = other DNA
cctgctttggaactaatctg

SEQ ID NO: 1051 - DNA, 20 bp, synthetic construct
  source 1..20: mol_type = other DNA
cacctgctttggaactaatc

SEQ ID NO: 1052 - DNA, 20 bp, synthetic construct
  source 1..20: mol_type = other DNA
ccacctgctttggaactaat

SEQ ID NO: 1053 - DNA, 20 bp, synthetic construct
  source 1..20: mol_type = other DNA
ggccacctgctttggaacta

SEQ ID NO: 1054 - DNA, 20 bp, synthetic construct
  source 1..20: mol_type = other DNA
gggccacctgctttggaact

SEQ ID NO: 1055 - DNA, 20 bp, synthetic construct
  source 1..20: mol_type = other DNA
aaagtgaggcttgggttcgg

SEQ ID NO: 1056 - DNA, 20 bp, synthetic construct
  source 1..20: mol_type = other DNA
aaaagtgaggcttgggttcg

SEQ ID NO: 1057 - DNA, 20 bp, synthetic construct
  source 1..20: mol_type = other DNA
agaaaagtgaggcttgggtt

SEQ ID NO: 1058 - DNA, 20 bp, synthetic construct
  source 1..20: mol_type = other DNA
cagaaaagtgaggcttgggt

SEQ ID NO: 1059 - DNA, 20 bp, synthetic construct
  source 1..20: mol_type = other DNA
cacagaaaagtgaggcttgg

SEQ ID NO: 1060 - DNA, 20 bp, synthetic construct
  source 1..20: mol_type = other DNA
gcacagaaaagtgaggcttg

SEQ ID NO: 1061 - DNA, 20 bp, synthetic construct
  source 1..20: mol_type = other DNA
aggcacagaaaagtgaggct

SEQ ID NO: 1062 - DNA, 20 bp, synthetic construct
  source 1..20: mol_type = other DNA
aaggcacagaaaagtgaggc

SEQ ID NO: 1063 - DNA, 20 bp, synthetic construct
  source 1..20: mol_type = other DNA
ggaaggcacagaaaagtgag

SEQ ID NO: 1064 - DNA, 20 bp, synthetic construct
  source 1..20: mol_type = other DNA
aggaaggcacagaaaagtga

SEQ ID NO: 1065 - DNA, 20 bp, synthetic construct
  source 1..20: mol_type = other DNA
tcaggaaggcacagaaaagt

SEQ ID NO: 1066 - DNA, 20 bp, synthetic construct
  source 1..20: mol_type = other DNA
ctcaggaaggcacagaaaag

SEQ ID NO: 1067 - DNA, 20 bp, synthetic construct
  source 1..20: mol_type = other DNA
ccctcaggaaggcacagaaa

SEQ ID NO: 1068 - DNA, 20 bp, synthetic construct
  source 1..20: mol_type = other DNA
cccctcaggaaggcacagaa

SEQ ID NO: 1069 - DNA, 20 bp, synthetic construct
  source 1..20: mol_type = other DNA
ccccctcaggaaggcacaga

SEQ ID NO: 1070 - DNA, 20 bp, synthetic construct
  source 1..20: mol_type = other DNA
aaccccctcaggaaggcaca

SEQ ID NO: 1071 - DNA, 20 bp, synthetic construct
  source 1..20: mol_type = other DNA
caaccccctcaggaaggcac

SEQ ID NO: 1072 - DNA, 20 bp, synthetic construct
  source 1..20: mol_type = other DNA
ccaaccccctcaggaaggca

SEQ ID NO: 1073 - DNA, 20 bp, synthetic construct
  source 1..20: mol_type = other DNA
cccaaccccctcaggaaggc

SEQ ID NO: 1074 - DNA, 20 bp, synthetic construct
  source 1..20: mol_type = other DNA
gcccaaccccctcaggaagg

SEQ ID NO: 1075 - DNA, 20 bp, synthetic construct
  source 1..20: mol_type = other DNA
ctcatcaagagataacagaa

SEQ ID NO: 1076 - DNA, 20 bp, synthetic construct
  source 1..20: mol_type = other DNA
atctcatcaagagataacag

SEQ ID NO: 1077 - DNA, 20 bp, synthetic construct
  source 1..20: mol_type = other DNA
gatctcatcaagagataaca

SEQ ID NO: 1078 - DNA, 20 bp, synthetic construct
  source 1..20: mol_type = other DNA
atgatctcatcaagagataa

SEQ ID NO: 1079 - DNA, 20 bp, synthetic construct
  source 1..20: mol_type = other DNA
acaaaagtctgacatggtgc

SEQ ID NO: 1080 - DNA, 20 bp, synthetic construct
  source 1..20: mol_type = other DNA
atacaaaagtctgacatggt

SEQ ID NO: 1081 - DNA, 20 bp, synthetic construct
  source 1..20: mol_type = other DNA
tatacaaaagtctgacatgg

SEQ ID NO: 1082 - DNA, 20 bp, synthetic construct
  source 1..20: mol_type = other DNA
catatacaaaagtctgacat

SEQ ID NO: 1083 - DNA, 20 bp, synthetic construct
  source 1..20: mol_type = other DNA
gcatatacaaaagtctgaca

SEQ ID NO: 1084 - DNA, 20 bp, synthetic construct
  source 1..20: mol_type = other DNA
ggcatatacaaaagtctgac

SEQ ID NO: 1085 - DNA, 17 bp, synthetic construct
  source 1..17: mol_type = other DNA
cagggccctttccagaa

SEQ ID NO: 1086 - DNA, 17 bp, synthetic construct
  source 1..17: mol_type = other DNA
acagggccctttccaga

SEQ ID NO: 1087 - DNA, 17 bp, synthetic construct
  source 1..17: mol_type = other DNA
cacagggccctttccag

SEQ ID NO: 1088 - DNA, 17 bp, synthetic construct
  source 1..17: mol_type = other DNA
cgaatatccctaataac

SEQ ID NO: 1089 - DNA, 17 bp, synthetic construct
  source 1..17: mol_type = other DNA
tcgaatatccctaataa

SEQ ID NO: 1090 - DNA, 17 bp, synthetic construct
  source 1..17: mol_type = other DNA
ctcgaatatccctaata

SEQ ID NO: 1091 - DNA, 17 bp, synthetic construct
  source 1..17: mol_type = other DNA
gacccactggagcactg

SEQ ID NO: 1092 - DNA, 17 bp, synthetic construct
  source 1..17: mol_type = other DNA
ggacccactggagcact

SEQ ID NO: 1093 - DNA, 17 bp, synthetic construct
  source 1..17: mol_type = other DNA
aggacccactggagcac

SEQ ID NO: 1094 - DNA, 17 bp, synthetic construct
  source 1..17: mol_type = other DNA
cagcgatgagccagcaa

SEQ ID NO: 1095 - DNA, 17 bp, synthetic construct
  source 1..17: mol_type = other DNA
acagcgatgagccagca

SEQ ID NO: 1096 - DNA, 17 bp, synthetic construct
  source 1..17: mol_type = other DNA
cacagcgatgagccagc

SEQ ID NO: 1097 - DNA, 17 bp, synthetic construct
  source 1..17: mol_type = other DNA
gcacagcgatgagccag

SEQ ID NO: 1098 - DNA, 17 bp, synthetic construct
  source 1..17: mol_type = other DNA
agcacagcgatgagcca

SEQ ID NO: 1099 - DNA, 17 bp, synthetic construct
  source 1..17: mol_type = other DNA
gagcacagcgatgagcc

SEQ ID NO: 1100 - DNA, 17 bp, synthetic construct
  source 1..17: mol_type = other DNA
ttcttgccaggcatgga

SEQ ID NO: 1101 - DNA, 17 bp, synthetic construct
  source 1..17: mol_type = other DNA
attcttgccaggcatgg

SEQ ID NO: 1102 - DNA, 17 bp, synthetic construct
  source 1..17: mol_type = other DNA
cattcttgccaggcatg

SEQ ID NO: 1103 - DNA, 17 bp, synthetic construct
  source 1..17: mol_type = other DNA
ctgcattcttgccaggc

SEQ ID NO: 1104 - DNA, 17 bp, synthetic construct
  source 1..17: mol_type = other DNA
actgcattcttgccagg

SEQ ID NO: 1105 - DNA, 17 bp, synthetic construct
  source 1..17: mol_type = other DNA
gactgcattcttgccag

SEQ ID NO: 1106 - DNA, 17 bp, synthetic construct
  source 1..17: mol_type = other DNA
tccgcagggtgactgca

SEQ ID NO: 1107 - DNA, 17 bp, synthetic construct
  source 1..17: mol_type = other DNA
ttccgcagggtgactgc

SEQ ID NO: 1108 - DNA, 17 bp, synthetic construct
  source 1..17: mol_type = other DNA
gttccgcagggtgactg

SEQ ID NO: 1109 - DNA, 17 bp, synthetic construct
  source 1..17: mol_type = other DNA
acacttcattctctcca

SEQ ID NO: 1110 - DNA, 17 bp, synthetic construct
  source 1..17: mol_type = other DNA
tacacttcattctctcc

SEQ ID NO: 1111 - DNA, 17 bp, synthetic construct
  source 1..17: mol_type = other DNA
gtacacttcattctctc

SEQ ID NO: 1112 - DNA, 17 bp, synthetic construct
  source 1..17: mol_type = other DNA
tgtacacttcattctct

SEQ ID NO: 1113 - DNA, 17 bp, synthetic construct
  source 1..17: mol_type = other DNA
ttgtacacttcattctc

SEQ ID NO: 1114 - DNA, 17 bp, synthetic construct
  source 1..17: mol_type = other DNA
cttgtacacttcattct

SEQ ID NO: 1115 - DNA, 17 bp, synthetic construct
  source 1..17: mol_type = other DNA
gcttgtacacttcattc

SEQ ID NO: 1116 - DNA, 17 bp, synthetic construct
  source 1..17: mol_type = other DNA
tgcttgtacacttcatt

SEQ ID NO: 1117 - DNA, 17 bp, synthetic construct
  source 1..17: mol_type = other DNA
ctgcttgtacacttcat

SEQ ID NO: 1118 - DNA, 17 bp, synthetic construct
  source 1..17: mol_type = other DNA
cctgcttgtacacttca

SEQ ID NO: 1119 - DNA, 17 bp, synthetic construct
  source 1..17: mol_type = other DNA
acctgcttgtacacttc

SEQ ID NO: 1120 - DNA, 17 bp, synthetic construct
  source 1..17: mol_type = other DNA
cacctgcttgtacactt

SEQ ID NO: 1121 - DNA, 17 bp, synthetic construct
  source 1..17: mol_type = other DNA
tcacctgcttgtacact

SEQ ID NO: 1122 - DNA, 17 bp, synthetic construct
  source 1..17: mol_type = other DNA
atcacctgcttgtacac

SEQ ID NO: 1123 - DNA, 17 bp, synthetic construct
  source 1..17: mol_type = other DNA
ctcctcgaagatcacct

SEQ ID NO: 1124 - DNA, 17 bp, synthetic construct
  source 1..17: mol_type = other DNA
cctcctcgaagatcacc

SEQ ID NO: 1125 - DNA, 17 bp, synthetic construct
  source 1..17: mol_type = other DNA
ccctcctcgaagatcac

SEQ ID NO: 1126 - DNA, 17 bp, synthetic construct
  source 1..17: mol_type = other DNA
tgtcgaagagcttcacc

SEQ ID NO: 1127 - DNA, 17 bp, synthetic construct
  source 1..17: mol_type = other DNA
ttgtcgaagagcttcac

SEQ ID NO: 1128 - DNA, 17 bp, synthetic construct
  source 1..17: mol_type = other DNA
cttgtcgaagagcttca

SEQ ID NO: 1129 - DNA, 17 bp, synthetic construct
  source 1..17: mol_type = other DNA
gtgcttgtcgaagagct

SEQ ID NO: 1130 - DNA, 17 bp, synthetic construct
  source 1..17: mol_type = other DNA
tgtgcttgtcgaagagc

SEQ ID NO: 1131 - DNA, 17 bp, synthetic construct
  source 1..17: mol_type = other DNA
ttgtgcttgtcgaagag

SEQ ID NO: 1132 - DNA, 17 bp, synthetic construct
  source 1..17: mol_type = other DNA
tcagttcacctccagga

SEQ ID NO: 1133 - DNA, 17 bp, synthetic construct
  source 1..17: mol_type = other DNA
ctcagttcacctccagg

SEQ ID NO: 1134 - DNA, 17 bp, synthetic construct
  source 1..17: mol_type = other DNA
gctcagttcacctccag

SEQ ID NO: 1135 - DNA, 17 bp, synthetic construct
  source 1..17: mol_type = other DNA
ggctcagttcacctcca

SEQ ID NO: 1136 - DNA, 17 bp, synthetic construct
  source 1..17: mol_type = other DNA
taacccacagacaccca

SEQ ID NO: 1137 - DNA, 17 bp, synthetic construct
  source 1..17: mol_type = other DNA
ataacccacagacaccc

SEQ ID NO: 1138 - DNA, 17 bp, synthetic construct
  source 1..17: mol_type = other DNA
aataacccacagacacc

SEQ ID NO: 1139 - DNA, 17 bp, synthetic construct
  source 1..17: mol_type = other DNA
agatttagccaccacct

SEQ ID NO: 1140 - DNA, 17 bp, synthetic construct
  source 1..17: mol_type = other DNA
cagatttagccaccacc

SEQ ID NO: 1141 - DNA, 17 bp, synthetic construct
  source 1..17: mol_type = other DNA
ccagatttagccaccac

SEQ ID NO: 1142 - DNA, 17 bp, synthetic construct
  source 1..17: mol_type = other DNA
cccagatttagccacca

SEQ ID NO: 1143 - DNA, 17 bp, synthetic construct
  source 1..17: mol_type = other DNA
gcccagatttagccacc

SEQ ID NO: 1144 - DNA, 17 bp, synthetic construct
  source 1..17: mol_type = other DNA
agagaaactggtcctgc

SEQ ID NO: 1145 - DNA, 17 bp, synthetic construct
  source 1..17: mol_type = other DNA
cagagaaactggtcctg

SEQ ID NO: 1146 - DNA, 17 bp, synthetic construct
  source 1..17: mol_type = other DNA
gcagagaaactggtcct

SEQ ID NO: 1147 - DNA, 17 bp, synthetic construct
  source 1..17: mol_type = other DNA
catgtcatcagccaccc

SEQ ID NO: 1148 - DNA, 17 bp, synthetic construct
  source 1..17: mol_type = other DNA
ccatgtcatcagccacc

SEQ ID NO: 1149 - DNA, 17 bp, synthetic construct
  source 1..17: mol_type = other DNA
tccatgtcatcagccac

SEQ ID NO: 1150 - DNA, 17 bp, synthetic construct
  source 1..17: mol_type = other DNA
tgtgctgcatccatgtc

SEQ ID NO: 1151 - DNA, 17 bp, synthetic construct
  source 1..17: mol_type = other DNA
ctgtgctgcatccatgt

SEQ ID NO: 1152 - DNA, 17 bp, synthetic construct
  source 1..17: mol_type = other DNA
tctgtgctgcatccatg

SEQ ID NO: 1153 - DNA, 17 bp, synthetic construct
  source 1..17: mol_type = other DNA
tgagtctgtgctgcatc

SEQ ID NO: 1154 - DNA, 17 bp, synthetic construct
  source 1..17: mol_type = other DNA
ctgagtctgtgctgcat

SEQ ID NO: 1155 - DNA, 17 bp, synthetic construct
  source 1..17: mol_type = other DNA
gctgagtctgtgctgca

SEQ ID NO: 1156 - DNA, 17 bp, synthetic construct
  source 1..17: mol_type = other DNA
cacagaaaagtgaggct

SEQ ID NO: 1157 - DNA, 17 bp, synthetic construct
  source 1..17: mol_type = other DNA
gcacagaaaagtgaggc

SEQ ID NO: 1158 - DNA, 17 bp, synthetic construct
  source 1..17: mol_type = other DNA
ggcacagaaaagtgagg

SEQ ID NO: 1159 - DNA, 17 bp, synthetic construct
  source 1..17: mol_type = other DNA
aaagtctgacatggtgc

SEQ ID NO: 1160 - DNA, 17 bp, synthetic construct
  source 1..17: mol_type = other DNA
aaaagtctgacatggtg

SEQ ID NO: 1161 - DNA, 17 bp, synthetic construct
  source 1..17: mol_type = other DNA
caaaagtctgacatggt

SEQ ID NO: 1162 - DNA, 20 bp, synthetic construct
  source 1..20: mol_type = other DNA
gtgagatccccagagaggaa

SEQ ID NO: 1163 - DNA, 20 bp, synthetic construct
  source 1..20: mol_type = other DNA
aaggagtgagatccccagag

SEQ ID NO: 1164 - DNA, 20 bp, synthetic construct
  source 1..20: mol_type = other DNA
ttctgaccctattttccaga

SEQ ID NO: 1165 - DNA, 20 bp, synthetic construct
  source 1..20: mol_type = other DNA
ccctccatccttgagaatct

SEQ ID NO: 1166 - DNA, 20 bp, synthetic construct
  source 1..20: mol_type = other DNA
atgtcacaagttcacaaaca

SEQ ID NO: 1167 - DNA, 20 bp, synthetic construct
  source 1..20: mol_type = other DNA
catgaatgtcacaagttcac

SEQ ID NO: 1168 - DNA, 20 bp, synthetic construct
  source 1..20: mol_type = other DNA
actaacatgaatgtcacaag

SEQ ID NO: 1169 - DNA, 20 bp, synthetic construct
  source 1..20: mol_type = other DNA
caaggactaacatgaatgtc

SEQ ID NO: 1170 - DNA, 20 bp, synthetic construct
  source 1..20: mol_type = other DNA
aatgacaaggactaacatga

SEQ ID NO: 1171 - DNA, 20 bp, synthetic construct
  source 1..20: mol_type = other DNA
ggacaaatgacaaggactaa

SEQ ID NO: 1172 - DNA, 20 bp, synthetic construct
  source 1..20: mol_type = other DNA
acacaggacaaatgacaagg

SEQ ID NO: 1173 - DNA, 20 bp, synthetic construct
  source 1..20: mol_type = other DNA
gtgtaacacaggacaaatga

SEQ ID NO: 1174 - DNA, 20 bp, synthetic construct
  source 1..20: mol_type = other DNA
tgaatgtgtaacacaggaca

SEQ ID NO: 1175 - DNA, 20 bp, synthetic construct
  source 1..20: mol_type = other DNA
cagggtctgccactctctac

SEQ ID NO: 1176 - DNA, 20 bp, synthetic construct
  source 1..20: mol_type = other DNA
tagagcagggtctgccactc

SEQ ID NO: 1177 - DNA, 20 bp, synthetic construct
  source 1..20: mol_type = other DNA
tcagtgaagccttcctggat

SEQ ID NO: 1178 - DNA, 20 bp, synthetic construct
  source 1..20: mol_type = other DNA
cttcctcagtgaagccttcc

SEQ ID NO: 1179 - DNA, 20 bp, synthetic construct
  source 1..20: mol_type = other DNA
agtcccttcctcagtgaagc

SEQ ID NO: 1180 - DNA, 20 bp, synthetic construct
  source 1..20: mol_type = other DNA
ccccaagtcccttcctcagt

SEQ ID NO: 1181 - DNA, 20 bp, synthetic construct
  source 1..20: mol_type = other DNA
cacagtcatcttgtgtacat

SEQ ID NO: 1182 - DNA, 20 bp, synthetic construct
  source 1..20: mol_type = other DNA
ctctgcacagtcatcttgtg

SEQ ID NO: 1183 - DNA, 20 bp, synthetic construct
  source 1..20: mol_type = other DNA
gatcactctgcacagtcatc

SEQ ID NO: 1184 - DNA, 20 bp, synthetic construct
  source 1..20: mol_type = other DNA
gctcagatcactctgcacag

SEQ ID NO: 1185 - DNA, 20 bp, synthetic construct
  source 1..20: mol_type = other DNA
tcattgctcagatcactctg

SEQ ID NO: 1186 - DNA, 20 bp, synthetic construct
  source 1..20: mol_type = other DNA
tcctgtcattgctcagatca

SEQ ID NO: 1187 - DNA, 20 bp, synthetic construct
  source 1..20: mol_type = other DNA
gtctttcctgtcattgctca

SEQ ID NO: 1188 - DNA, 20 bp, synthetic construct
  source 1..20: mol_type = other DNA
tcagggtgatcaagctcccc

SEQ ID NO: 1189 - DNA, 20 bp, synthetic construct
  source 1..20: mol_type = other DNA
tgacctcagggtgatcaagc

SEQ ID NO: 1190 - DNA, 20 bp, synthetic construct
  source 1..20: mol_type = other DNA
ttccctgacctcagggtgat

SEQ ID NO: 1191 - DNA, 20 bp, synthetic construct
  source 1..20: mol_type = other DNA
aagacttccctgacctcagg

SEQ ID NO: 1192 - DNA, 20 bp, synthetic construct
  source 1..20: mol_type = other DNA
ccaggaagacttccctgacc

SEQ ID NO: 1193 - DNA, 20 bp, synthetic construct
  source 1..20: mol_type = other DNA
ctcttccaggaagacttccc

SEQ ID NO: 1194 - DNA, 20 bp, synthetic construct
  source 1..20: mol_type = other DNA
gtcacctcttccaggaagac

SEQ ID NO: 1195 - DNA, 20 bp, synthetic construct
  source 1..20: mol_type = other DNA
tgaatgtcacctcttccagg

SEQ ID NO: 1196 - DNA, 20 bp, synthetic construct
  source 1..20: mol_type = other DNA
cggactgaatgtcacctctt

SEQ ID NO: 1197 - DNA, 20 bp, synthetic construct
  source 1..20: mol_type = other DNA
agatccggactgaatgtcac

SEQ ID NO: 1198 - DNA, 20 bp, synthetic construct
  source 1..20: mol_type = other DNA
tttccagatccggactgaat

SEQ ID NO: 1199 - DNA, 20 bp, synthetic construct
  source 1..20: mol_type = other DNA
tcatctttccagatccggac

SEQ ID NO: 1200 - DNA, 20 bp, synthetic construct
  source 1..20: mol_type = other DNA
tctattcatctttccagatc

SEQ ID NO: 1201 - DNA, 20 bp, synthetic construct
  source 1..20: mol_type = other DNA
tgaatgttcttgcctgtctt

SEQ ID NO: 1202 - DNA, 20 bp, synthetic construct
  source 1..20: mol_type = other DNA
gtacctgaatgttcttgcct

SEQ ID NO: 1203 - DNA, 20 bp, synthetic construct
  source 1..20: mol_type = other DNA
ttcctgtacctgaatgttct

SEQ ID NO: 1204 - DNA, 20 bp, synthetic construct
  source 1..20: mol_type = other DNA
tgcctctcccatccaaatct

SEQ ID NO: 1205 - DNA, 20 bp, synthetic construct
  source 1..20: mol_type = other DNA
gttggtcactcagaggccct

SEQ ID NO: 1206 - DNA, 20 bp, synthetic construct
  source 1..20: mol_type = other DNA
acaggcctggatccagcatc

SEQ ID NO: 1207 - DNA, 20 bp, synthetic construct
  source 1..20: mol_type = other DNA
tcttcctcctgctgcagaca

SEQ ID NO: 1208 - DNA, 20 bp, synthetic construct
  source 1..20: mol_type = other DNA
tcaagtcttcctcctgctgc

SEQ ID NO: 1209 - DNA, 20 bp, synthetic construct
  source 1..20: mol_type = other DNA
agctctcaagtcttcctcct

SEQ ID NO: 1210 - DNA, 20 bp, synthetic construct
  source 1..20: mol_type = other DNA
ccatgagctctcaagtcttc

SEQ ID NO: 1211 - DNA, 20 bp, synthetic construct
  source 1..20: mol_type = other DNA
ctttcccatgagctctcaag

SEQ ID NO: 1212 - DNA, 20 bp, synthetic construct
  source 1..20: mol_type = other DNA
ggctcctttcccatgagctc

SEQ ID NO: 1213 - DNA, 20 bp, synthetic construct
  source 1..20: mol_type = other DNA
caccaggctcctttcccatg

SEQ ID NO: 1214 - DNA, 20 bp, synthetic construct
  source 1..20: mol_type = other DNA
aactgcaccaggctcctttc

SEQ ID NO: 1215 - DNA, 20 bp, synthetic construct
  source 1..20: mol_type = other DNA
aaactaactgcaccaggctc

SEQ ID NO: 1216 - DNA, 20 bp, synthetic construct
  source 1..20: mol_type = other DNA
ccaataaactaactgcacca

SEQ ID NO: 1217 - DNA, 20 bp, synthetic construct
  source 1..20: mol_type = other DNA
ggaggccaataaactaactg

SEQ ID NO: 1218 - DNA, 20 bp, synthetic construct
  source 1..20: mol_type = other DNA
gtgctggaggccaataaact

SEQ ID NO: 1219 - DNA, 20 bp, synthetic construct
  source 1..20: mol_type = other DNA
tcaaagtgctggaggccaat

SEQ ID NO: 1220 - DNA, 20 bp, synthetic construct
  source 1..20: mol_type = other DNA
agccagcagctccataccag

SEQ ID NO: 1221 - DNA, 20 bp, synthetic construct
  source 1..20: mol_type = other DNA
aaatcagccagcagctccat

SEQ ID NO: 1222 - DNA, 20 bp, synthetic construct
  source 1..20: mol_type = other DNA
ccctcaaatcagccagcagc

SEQ ID NO: 1223 - DNA, 20 bp, synthetic construct
  source 1..20: mol_type = other DNA
tgaggccctcaaatcagcca

SEQ ID NO: 1224 - DNA, 20 bp, synthetic construct
  source 1..20: mol_type = other DNA
gcccatgaggccctcaaatc

SEQ ID NO: 1225 - DNA, 20 bp, synthetic construct
  source 1..20: mol_type = other DNA
gccctgcccatgaggccctc

SEQ ID NO: 1226 - DNA, 20 bp, synthetic construct
  source 1..20: mol_type = other DNA
cctgggccctgcccatgagg

SEQ ID NO: 1227 - DNA, 20 bp, synthetic construct
  source 1..20: mol_type = other DNA
gccaagcaggagctggacag

SEQ ID NO: 1228 - DNA, 20 bp, synthetic construct
  source 1..20: mol_type = other DNA
tagtggcttgctgaggctgc

SEQ ID NO: 1229 - DNA, 20 bp, synthetic construct
  source 1..20: mol_type = other DNA
aagggtagtggcttgctgag

SEQ ID NO: 1230 - DNA, 20 bp, synthetic construct
  source 1..20: mol_type = other DNA
taaggaagggtagtggcttg

SEQ ID NO: 1231 - DNA, 20 bp, synthetic construct
  source 1..20: mol_type = other DNA
gagactgagggtaaggaagg

SEQ ID NO: 1232 - DNA, 20 bp, synthetic construct
  source 1..20: mol_type = other DNA
atgaggagactgagggtaag

SEQ ID NO: 1233 - DNA, 20 bp, synthetic construct
  source 1..20: mol_type = other DNA
catagatgaggagactgagg

SEQ ID NO: 1234 - DNA, 20 bp, synthetic construct
  source 1..20: mol_type = other DNA
catttcatagatgaggagac

SEQ ID NO: 1235 - DNA, 20 bp, synthetic construct
  source 1..20: mol_type = other DNA
ttgctcatttcatagatgag

SEQ ID NO: 1236 - DNA, 20 bp, synthetic construct
  source 1..20: mol_type = other DNA
cacttttgctcatttcatag

SEQ ID NO: 1237 - DNA, 20 bp, synthetic construct
  source 1..20: mol_type = other DNA
ataatctgcacaggttctta

SEQ ID NO: 1238 - DNA, 20 bp, synthetic construct
  source 1..20: mol_type = other DNA
gcaccataatctgcacaggt

SEQ ID NO: 1239 - DNA, 20 bp, synthetic construct
  source 1..20: mol_type = other DNA
gggtctaggtgagtgagaaa

SEQ ID NO: 1240 - DNA, 20 bp, synthetic construct
  source 1..20: mol_type = other DNA
atctggacctaatgtctgcc

SEQ ID NO: 1241 - DNA, 20 bp, synthetic construct
  source 1..20: mol_type = other DNA
ggcccatctggacctaatgt

SEQ ID NO: 1242 - DNA, 20 bp, synthetic construct
  source 1..20: mol_type = other DNA
acctgggcccatctggacct

SEQ ID NO: 1243 - DNA, 20 bp, synthetic construct
  source 1..20: mol_type = other DNA
ctcttgggctccttgaggca

SEQ ID NO: 1244 - DNA, 20 bp, synthetic construct
  source 1..20: mol_type = other DNA
acagcctcttgggctccttg

SEQ ID NO: 1245 - DNA, 20 bp, synthetic construct
  source 1..20: mol_type = other DNA
tgtgaacagcctcttgggct

SEQ ID NO: 1246 - DNA, 20 bp, synthetic construct
  source 1..20: mol_type = other DNA
agaggtgtgaacagcctctt

SEQ ID NO: 1247 - DNA, 20 bp, synthetic construct
  source 1..20: mol_type = other DNA
gccagaaagatgccagctaa

SEQ ID NO: 1248 - DNA, 20 bp, synthetic construct
  source 1..20: mol_type = other DNA
agagagccagaaagatgcca

SEQ ID NO: 1249 - DNA, 20 bp, synthetic construct
  source 1..20: mol_type = other DNA
aaaagggccagaatgtctgg

SEQ ID NO: 1250 - DNA, 20 bp, synthetic construct
  source 1..20: mol_type = other DNA
taaggaatctaaataactta

SEQ ID NO: 1251 - DNA, 20 bp, synthetic construct
  source 1..20: mol_type = other DNA
tgtcataaggaatctaaata

SEQ ID NO: 1252 - DNA, 20 bp, synthetic construct
  source 1..20: mol_type = other DNA
aggattgtcataaggaatct

SEQ ID NO: 1253 - DNA, 20 bp, synthetic construct
  source 1..20: mol_type = other DNA
aatccaggattgtcataagg

SEQ ID NO: 1254 - DNA, 20 bp, synthetic construct
  source 1..20: mol_type = other DNA
gctttaatccaggattgtca

SEQ ID NO: 1255 - DNA, 20 bp, synthetic construct
  source 1..20: mol_type = other DNA
ccttagctttaatccaggat

SEQ ID NO: 1256 - DNA, 20 bp, synthetic construct
  source 1..20: mol_type = other DNA
gtcctccttagctttaatcc

SEQ ID NO: 1257 - DNA, 20 bp, synthetic construct
  source 1..20: mol_type = other DNA
tcagtgtcctccttagcttt

SEQ ID NO: 1258 - DNA, 20 bp, synthetic construct
  source 1..20: mol_type = other DNA
gggactcagtgtcctcctta

SEQ ID NO: 1259 - DNA, 20 bp, synthetic construct
  source 1..20: mol_type = other DNA
tccctgggactcagtgtcct

SEQ ID NO: 1260 - DNA, 20 bp, synthetic construct
  source 1..20: mol_type = other DNA
gattcttacctgcaatgaga

SEQ ID NO: 1261 - DNA, 20 bp, synthetic construct
  source 1..20: mol_type = other DNA
gctctgattcttacctgcaa

SEQ ID NO: 1262 - DNA, 20 bp, synthetic construct
  source 1..20: mol_type = other DNA
ccctggctctgattcttacc

SEQ ID NO: 1263 - DNA, 20 bp, synthetic construct
  source 1..20: mol_type = other DNA
tcaaaccctggctctgattc

SEQ ID NO: 1264 - DNA, 20 bp, synthetic construct
  source 1..20: mol_type = other DNA
aggattcaaaccctggctct

SEQ ID NO: 1265 - DNA, 20 bp, synthetic construct
  source 1..20: mol_type = other DNA
atgcctgccctgcctaggaa

SEQ ID NO: 1266 - DNA, 20 bp, synthetic construct
  source 1..20: mol_type = other DNA
aaataatgcctgccctgcct

SEQ ID NO: 1267 - DNA, 20 bp, synthetic construct
  source 1..20: mol_type = other DNA
gggtaaaataatgcctgccc

SEQ ID NO: 1268 - DNA, 20 bp, synthetic construct
  source 1..20: mol_type = other DNA
ttgatgggtaaaataatgcc

SEQ ID NO: 1269 - DNA, 20 bp, synthetic construct
  source 1..20: mol_type = other DNA
cctgtttgatgggtaaaata

SEQ ID NO: 1270 - DNA, 20 bp, synthetic construct
  source 1..20: mol_type = other DNA
cctctcctgtttgatgggta

SEQ ID NO: 1271 - DNA, 20 bp, synthetic construct
  source 1..20: mol_type = other DNA
ggtgtcctctcctgtttgat

SEQ ID NO: 1272 - DNA, 20 bp, synthetic construct
  source 1..20: mol_type = other DNA
gcctcggtgtcctctcctgt

SEQ ID NO: 1273 - DNA, 20 bp, synthetic construct
  source 1..20: mol_type = other DNA
agtaagcctcggtgtcctct

SEQ ID NO: 1274 - DNA, 20 bp, synthetic construct
  source 1..20: mol_type = other DNA
taccaagtaagcctcggtgt

SEQ ID NO: 1275 - DNA, 20 bp, synthetic construct
  source 1..20: mol_type = other DNA
ttaattaccaagtaagcctc

SEQ ID NO: 1276 - DNA, 20 bp, synthetic construct
  source 1..20: mol_type = other DNA
ttcataaaaagtaaagatct

SEQ ID NO: 1277 - DNA, 20 bp, synthetic construct
  source 1..20: mol_type = other DNA
agagcttcataaaaagtaaa

SEQ ID NO: 1278 - DNA, 20 bp, synthetic construct
  source 1..20: mol_type = other DNA
agccaagagcttcataaaaa

SEQ ID NO: 1279 - DNA, 20 bp, synthetic construct
  source 1..20: mol_type = other DNA
tcaccagattgttgtgggaa

SEQ ID NO: 1280 - DNA, 20 bp, synthetic construct
  source 1..20: mol_type = other DNA
ctacctcaccagattgttgt

SEQ ID NO: 1281 - DNA, 20 bp, synthetic construct
  source 1..20: mol_type = other DNA
aatacctacctcaccagatt

SEQ ID NO: 1282 - DNA, 20 bp, synthetic construct
  source 1..20: mol_type = other DNA
gggctaatacctacctcacc

SEQ ID NO: 1283 - DNA, 20 bp, synthetic construct
  source 1..20: mol_type = other DNA
ttcctcatctatacagtggg

SEQ ID NO: 1284 - DNA, 20 bp, synthetic construct
  source 1..20: mol_type = other DNA
tcagcttcctcatctataca

SEQ ID NO: 1285 - DNA, 20 bp, synthetic construct
  source 1..20: mol_type = other DNA
aagcttcagcttcctcatct

SEQ ID NO: 1286 - DNA, 20 bp, synthetic construct
  source 1..20: mol_type = other DNA
tatacaagcttcagcttcct

SEQ ID NO: 1287 - DNA, 20 bp, synthetic construct
  source 1..20: mol_type = other DNA
cttcctatacaagcttcagc

SEQ ID NO: 1288 - DNA, 20 bp, synthetic construct
  source 1..20: mol_type = other DNA
agtcacttcctatacaagct

SEQ ID NO: 1289 - DNA, 20 bp, synthetic construct
  source 1..20: mol_type = other DNA
agaacctggcctctaactcg

SEQ ID NO: 1290 - DNA, 20 bp, synthetic construct
  source 1..20: mol_type = other DNA
catactggcatctggcaggg

SEQ ID NO: 1291 - DNA, 20 bp, synthetic construct
  source 1..20: mol_type = other DNA
acctccatactggcatctgg

SEQ ID NO: 1292 - DNA, 20 bp, synthetic construct
  source 1..20: mol_type = other DNA
acctcacctccatactggca

SEQ ID NO: 1293 - DNA, 20 bp, synthetic construct
  source 1..20: mol_type = other DNA
atgaagaaaaataatttggg

SEQ ID NO: 1294 - DNA, 20 bp, synthetic construct
  source 1..20: mol_type = other DNA
ttaacttctgctgagggaga

SEQ ID NO: 1295 - DNA, 20 bp, synthetic construct
  source 1..20: mol_type = other DNA
gatgcttaacttctgctgag

SEQ ID NO: 1296 - DNA, 20 bp, synthetic construct
  source 1..20: mol_type = other DNA
gttaggatgcttaacttctg

SEQ ID NO: 1297 - DNA, 20 bp, synthetic construct
  source 1..20: mol_type = other DNA
gttaagttaggatgcttaac

SEQ ID NO: 1298 - DNA, 20 bp, synthetic construct
  source 1..20: mol_type = other DNA
ataggcctggatgcccaagt

SEQ ID NO: 1299 - DNA, 20 bp, synthetic construct
  source 1..20: mol_type = other DNA
cagaggcagctataggcctg

SEQ ID NO: 1300 - DNA, 20 bp, synthetic construct
  source 1..20: mol_type = other DNA
tgcctcagaggcagctatag

SEQ ID NO: 1301 - DNA, 20 bp, synthetic construct
  source 1..20: mol_type = other DNA
tgtcctgcctcagaggcagc

SEQ ID NO: 1302 - DNA, 20 bp, synthetic construct
  source 1..20: mol_type = other DNA
gatgatgtcctgcctcagag

SEQ ID NO: 1303 - DNA, 20 bp, synthetic construct
  source 1..20: mol_type = other DNA
cagcagatgatgtcctgcct

SEQ ID NO: 1304 - DNA, 20 bp, synthetic construct
  source 1..20: mol_type = other DNA
gggacagagctaagacccaa

SEQ ID NO: 1305 - DNA, 20 bp, synthetic construct
  source 1..20: mol_type = other DNA
gtcaaaggtggcttcctggg

SEQ ID NO: 1306 - DNA, 20 bp, synthetic construct
  source 1..20: mol_type = other DNA
gagtagtcaaaggtggcttc

SEQ ID NO: 1307 - DNA, 20 bp, synthetic construct
  source 1..20: mol_type = other DNA
ggaatgagtagtcaaaggtg

SEQ ID NO: 1308 - DNA, 20 bp, synthetic construct
  source 1..20: mol_type = other DNA
aagttggaatgagtagtcaa

SEQ ID NO: 1309 - DNA, 20 bp, synthetic construct
  source 1..20: mol_type = other DNA
gctgagaataaagaagttgg

SEQ ID NO: 1310 - DNA, 20 bp, synthetic construct
  source 1..20: mol_type = other DNA
tagaagctgagaataaagaa

SEQ ID NO: 1311 - DNA, 20 bp, synthetic construct
  source 1..20: mol_type = other DNA
tgaaatagaagctgagaata

SEQ ID NO: 1312 - DNA, 20 bp, synthetic construct
  source 1..20: mol_type = other DNA
ggagttctaatgaggcagac

SEQ ID NO: 1313 - DNA, 20 bp, synthetic construct
  source 1..20: mol_type = other DNA
tgcagggagttctaatgagg

SEQ ID NO: 1314 - DNA, 20 bp, synthetic construct
  source 1..20: mol_type = other DNA
agccttgcagggagttctaa

SEQ ID NO: 1315 - DNA, 20 bp, synthetic construct
  source 1..20: mol_type = other DNA
aacaaagccttgcagggagt

SEQ ID NO: 1316 - DNA, 20 bp, synthetic construct
  source 1..20: mol_type = other DNA
atggcaagtgcttccgtggg

SEQ ID NO: 1317 - DNA, 20 bp, synthetic construct
  source 1..20: mol_type = other DNA
accaaatggcaagtgcttcc

SEQ ID NO: 1318 - DNA, 20 bp, synthetic construct
  source 1..20: mol_type = other DNA
caaataccaaatggcaagtg

SEQ ID NO: 1319 - DNA, 20 bp, synthetic construct
  source 1..20: mol_type = other DNA
ctgcaaggtggtgagctcta

SEQ ID NO: 1320 - DNA, 20 bp, synthetic construct
  source 1..20: mol_type = other DNA
cctcacttcccatctgcctg

SEQ ID NO: 1321 - DNA, 20 bp, synthetic construct
  source 1..20: mol_type = other DNA
tgaaccctcacttcccatct

SEQ ID NO: 1322 - DNA, 20 bp, synthetic construct
  source 1..20: mol_type = other DNA
ccaagtgaaccctcacttcc

SEQ ID NO: 1323 - DNA, 20 bp, synthetic construct
  source 1..20: mol_type = other DNA
gtctaccaagtgaaccctca

SEQ ID NO: 1324 - DNA, 20 bp, synthetic construct
  source 1..20: mol_type = other DNA
atgcagtctaccaagtgaac

SEQ ID NO: 1325 - DNA, 20 bp, synthetic construct
  source 1..20: mol_type = other DNA
gggaaatgcagtctaccaag

SEQ ID NO: 1326 - DNA, 20 bp, synthetic construct
  source 1..20: mol_type = other DNA
caagtgggaaatgcagtcta

SEQ ID NO: 1327 - DNA, 20 bp, synthetic construct
  source 1..20: mol_type = other DNA
gccaacaagtgggaaatgca

SEQ ID NO: 1328 - DNA, 20 bp, synthetic construct
  source 1..20: mol_type = other DNA
ccaactaccgcccacagctc

SEQ ID NO: 1329 - DNA, 20 bp, synthetic construct
  source 1..20: mol_type = other DNA
cagccccaactaccgcccac

SEQ ID NO: 1330 - DNA, 20 bp, synthetic construct
  source 1..20: mol_type = other DNA
ttatccagccccaactaccg

SEQ ID NO: 1331 - DNA, 20 bp, synthetic construct
  source 1..20: mol_type = other DNA
ctgccttatccagccccaac

SEQ ID NO: 1332 - DNA, 20 bp, synthetic construct
  source 1..20: mol_type = other DNA
tcaccctgccttatccagcc

SEQ ID NO: 1333 - DNA, 20 bp, synthetic construct
  source 1..20: mol_type = other DNA
tcttgttcaaccctcacccc

SEQ ID NO: 1334 - DNA, 20 bp, synthetic construct
  source 1..20: mol_type = other DNA
cttattaggtgtcttaaaat

SEQ ID NO: 1335 - DNA, 20 bp, synthetic construct
  source 1..20: mol_type = other DNA
ctaagcttattaggtgtctt

SEQ ID NO: 1336 - DNA, 20 bp, synthetic construct
  source 1..20: mol_type = other DNA
ctctgctaagcttattaggt

SEQ ID NO: 1337 - DNA, 20 bp, synthetic construct
  source 1..20: mol_type = other DNA
actgagaagacctaaaaatt

SEQ ID NO: 1338 - DNA, 20 bp, synthetic construct
  source 1..20: mol_type = other DNA
aaacaactgagaagacctaa

SEQ ID NO: 1339 - DNA, 20 bp, synthetic construct
  source 1..20: mol_type = other DNA
aactgaaacaactgagaaga

SEQ ID NO: 1340 - DNA, 20 bp, synthetic construct
  source 1..20: mol_type = other DNA
tccccaactgaaacaactga

SEQ ID NO: 1341 - DNA, 20 bp, synthetic construct
  source 1..20: mol_type = other DNA
gacatatccccaactgaaac

SEQ ID NO: 1342 - DNA, 20 bp, synthetic construct
  source 1..20: mol_type = other DNA
ctgatgacatatccccaact

SEQ ID NO: 1343 - DNA, 20 bp, synthetic construct
  source 1..20: mol_type = other DNA
tttcactgatgacatatccc

SEQ ID NO: 1344 - DNA, 20 bp, synthetic construct
  source 1..20: mol_type = other DNA
agaaatttcactgatgacat

SEQ ID NO: 1345 - DNA, 20 bp, synthetic construct
  source 1..20: mol_type = other DNA
agtatagaaatttcactgat

SEQ ID NO: 1346 - DNA, 20 bp, synthetic construct
  source 1..20: mol_type = other DNA
ggaggagtatagaaatttca

SEQ ID NO: 1347 - DNA, 20 bp, synthetic construct
  source 1..20: mol_type = other DNA
ttggaggaggagtatagaaa

SEQ ID NO: 1348 - DNA, 20 bp, synthetic construct
  source 1..20: mol_type = other DNA
gcagcttggaggaggagtat

SEQ ID NO: 1349 - DNA, 20 bp, synthetic construct
  source 1..20: mol_type = other DNA
cccatgcagcttggaggagg

SEQ ID NO: 1350 - DNA, 20 bp, synthetic construct
  source 1..20: mol_type = other DNA
cagcccccatgcagcttgga

SEQ ID NO: 1351 - DNA, 20 bp, synthetic construct
  source 1..20: mol_type = other DNA
agggccagcccccatgcagc

SEQ ID NO: 1352 - DNA, 20 bp, synthetic construct
  source 1..20: mol_type = other DNA
ttatctagctccctaccttg

SEQ ID NO: 1353 - DNA, 20 bp, synthetic construct
  source 1..20: mol_type = other DNA
tgaagccagtggtttgaggg

SEQ ID NO: 1354 - DNA, 20 bp, synthetic construct
  source 1..20: mol_type = other DNA
tgcttcccgttgcagacagg

SEQ ID NO: 1355 - DNA, 20 bp, synthetic construct
  source 1..20: mol_type = other DNA
gtccaaacactcaggtaggg

SEQ ID NO: 1356 - DNA, 20 bp, synthetic construct
  source 1..20: mol_type = other DNA
cttcagtccaaacactcagg

SEQ ID NO: 1357 - DNA, 20 bp, synthetic construct
  source 1..20: mol_type = other DNA
ttaagtctgagaaacaccac

SEQ ID NO: 1358 - DNA, 20 bp, synthetic construct
  source 1..20: mol_type = other DNA
ggtgattaagtctgagaaac

SEQ ID NO: 1359 - DNA, 20 bp, synthetic construct
  source 1..20: mol_type = other DNA
ccccaggtgattaagtctga

SEQ ID NO: 1360 - DNA, 20 bp, synthetic construct
  source 1..20: mol_type = other DNA
aagatccccaggtgattaag

SEQ ID NO: 1361 - DNA, 20 bp, synthetic construct
  source 1..20: mol_type = other DNA
ttaacaagatccccaggtga

SEQ ID NO: 1362 - DNA, 20 bp, synthetic construct
  source 1..20: mol_type = other DNA
tgcattttaacaagatcccc

SEQ ID NO: 1363 - DNA, 20 bp, synthetic construct
  source 1..20: mol_type = other DNA
aaatctgcattttaacaaga

SEQ ID NO: 1364 - DNA, 20 bp, synthetic construct
  source 1..20: mol_type = other DNA
aatcaaaatctgcattttaa

SEQ ID NO: 1365 - DNA, 20 bp, synthetic construct
  source 1..20: mol_type = other DNA
tactgaatcaaaatctgcat

SEQ ID NO: 1366 - DNA, 20 bp, synthetic construct
  source 1..20: mol_type = other DNA
ggatttactgaatcaaaatc

SEQ ID NO: 1367 - DNA, 20 bp, synthetic construct
  source 1..20: mol_type = other DNA
agactggatttactgaatca

SEQ ID NO: 1368 - DNA, 20 bp, synthetic construct
  source 1..20: mol_type = other DNA
gctccagactggatttactg

SEQ ID NO: 1369 - DNA, 20 bp, synthetic construct
  source 1..20: mol_type = other DNA
agcagcatcagcatcacctg

SEQ ID NO: 1370 - DNA, 20 bp, synthetic construct
  source 1..20: mol_type = other DNA
ggaacagcagcatcagcatc

SEQ ID NO: 1371 - DNA, 20 bp, synthetic construct
  source 1..20: mol_type = other DNA
gtctgggaacagcagcatca

SEQ ID NO: 1372 - DNA, 20 bp, synthetic construct
  source 1..20: mol_type = other DNA
tactctagcactttcctact

SEQ ID NO: 1373 - DNA, 20 bp, synthetic construct
  source 1..20: mol_type = other DNA
aaatgtactctagcactttc

SEQ ID NO: 1374 - DNA, 20 bp, synthetic construct
  source 1..20: mol_type = other DNA
agacaaaatgtactctagca

SEQ ID NO: 1375 - DNA, 20 bp, synthetic construct
  source 1..20: mol_type = other DNA
ggctggatgccctggctaga

SEQ ID NO: 1376 - DNA, 20 bp, synthetic construct
  source 1..20: mol_type = other DNA
aggcaggctggatgccctgg

SEQ ID NO: 1377 - DNA, 20 bp, synthetic construct
  source 1..20: mol_type = other DNA
atctgaggcaggctggatgc

SEQ ID NO: 1378 - DNA, 20 bp, synthetic construct
  source 1..20: mol_type = other DNA
atcttccagcagctggctct

SEQ ID NO: 1379 - DNA, 20 bp, synthetic construct
  source 1..20: mol_type = other DNA
aagtcatcttccagcagctg

SEQ ID NO: 1380 - DNA, 20 bp, synthetic construct
  source 1..20: mol_type = other DNA
tggacaagtcatcttccagc

SEQ ID NO: 1381 - DNA, 20 bp, synthetic construct
  source 1..20: mol_type = other DNA
aagtccaagcacaggcttga

SEQ ID NO: 1382 - DNA, 20 bp, synthetic construct
  source 1..20: mol_type = other DNA
aagtgaagtccaagcacagg

SEQ ID NO: 1383 - DNA, 20 bp, synthetic construct
  source 1..20: mol_type = other DNA
gagggaagtgaagtccaagc

SEQ ID NO: 1384 - DNA, 20 bp, synthetic construct
  source 1..20: mol_type = other DNA
tccttgagggtctcataacc

SEQ ID NO: 1385 - DNA, 20 bp, synthetic construct
  source 1..20: mol_type = other DNA
gcttatccttgagggtctca

SEQ ID NO: 1386 - DNA, 20 bp, synthetic construct
  source 1..20: mol_type = other DNA
cacatgcttatccttgaggg

SEQ ID NO: 1387 - DNA, 20 bp, synthetic construct
  source 1..20: mol_type = other DNA
ttcatcacatgcttatcctt

SEQ ID NO: 1388 - DNA, 20 bp, synthetic construct
  source 1..20: mol_type = other DNA
atgagttcatcacatgctta

SEQ ID NO: 1389 - DNA, 20 bp, synthetic construct
  source 1..20: mol_type = other DNA
tcaacctgcccagcagtggg

SEQ ID NO: 1390 - DNA, 20 bp, synthetic construct
  source 1..20: mol_type = other DNA
ctctgtacacaggacacagt

SEQ ID NO: 1391 - DNA, 20 bp, synthetic construct
  source 1..20: mol_type = other DNA
aaaggctctgtacacaggac

SEQ ID NO: 1392 - DNA, 20 bp, synthetic construct
  source 1..20: mol_type = other DNA
agtgcaaaggctctgtacac

SEQ ID NO: 1393 - DNA, 20 bp, synthetic construct
  source 1..20: mol_type = other DNA
ggcaacctaaggagtgaggg

SEQ ID NO: 1394 - DNA, 20 bp, synthetic construct
  source 1..20: mol_type = other DNA
tggatggcaacctaaggagt

SEQ ID NO: 1395 - DNA, 20 bp, synthetic construct
  source 1..20: mol_type = other DNA
tggcctggatggcaacctaa

SEQ ID NO: 1396 - DNA, 20 bp, synthetic construct
  source 1..20: mol_type = other DNA
gctatgctgagagcacaggg

SEQ ID NO: 1397 - DNA, 20 bp, synthetic construct
  source 1..20: mol_type = other DNA
tacctgctatgctgagagca

SEQ ID NO: 1398 - DNA, 20 bp, synthetic construct
  source 1..20: mol_type = other DNA
gaagctacctgctatgctga

SEQ ID NO: 1399 - DNA, 20 bp, synthetic construct
  source 1..20: mol_type = other DNA
ctgaggaagctacctgctat

SEQ ID NO: 1400 - DNA, 20 bp, synthetic construct
  source 1..20: mol_type = other DNA
caggttcatctgccttgacg

SEQ ID NO: 1401 - DNA, 20 bp, synthetic construct
  source 1..20: mol_type = other DNA
tggagcaggttcatctgcct

SEQ ID NO: 1402 - DNA, 20 bp, synthetic construct
  source 1..20: mol_type = other DNA
tgctctggagcaggttcatc

SEQ ID NO: 1403 - DNA, 20 bp, synthetic construct
  source 1..20: mol_type = other DNA
tgtgatgctctggagcaggt

SEQ ID NO: 1404 - DNA, 20 bp, synthetic construct
  source 1..20: mol_type = other DNA
cactctgtgatgctctggag

SEQ ID NO: 1405 - DNA, 20 bp, synthetic construct
  source 1..20: mol_type = other DNA
gaatgcactctgtgatgctc

SEQ ID NO: 1406 - DNA, 20 bp, synthetic construct
  source 1..20: mol_type = other DNA
cagagggactggctcacagg

SEQ ID NO: 1407 - DNA, 20 bp, synthetic construct
  source 1..20: mol_type = other DNA
tacagtcccgaagagtgggt

SEQ ID NO: 1408 - DNA, 20 bp, synthetic construct
  source 1..20: mol_type = other DNA
gcctatacagtcccgaagag

SEQ ID NO: 1409 - DNA, 20 bp, synthetic construct
  source 1..20: mol_type = other DNA
taccagcctatacagtcccg

SEQ ID NO: 1410 - DNA, 20 bp, synthetic construct
  source 1..20: mol_type = other DNA
tcccctaccagcctatacag

SEQ ID NO: 1411 - DNA, 20 bp, synthetic construct
  source 1..20: mol_type = other DNA
gatgatcccctaccagccta

SEQ ID NO: 1412 - DNA, 20 bp, synthetic construct
  source 1..20: mol_type = other DNA
gtcctgatgatcccctacca

SEQ ID NO: 1413 - DNA, 20 bp, synthetic construct
  source 1..20: mol_type = other DNA
ggtaagtcctgatgatcccc

SEQ ID NO: 1414 - DNA, 20 bp, synthetic construct
  source 1..20: mol_type = other DNA
gacatggtaagtcctgatga

SEQ ID NO: 1415 - DNA, 20 bp, synthetic construct
  source 1..20: mol_type = other DNA
gcactgacatggtaagtcct

SEQ ID NO: 1416 - DNA, 20 bp, synthetic construct
  source 1..20: mol_type = other DNA
gctcagcactgacatggtaa

SEQ ID NO: 1417 - DNA, 20 bp, synthetic construct
  source 1..20: mol_type = other DNA
cagctgctcagcactgacat

SEQ ID NO: 1418 - DNA, 20 bp, synthetic construct
  source 1..20: mol_type = other DNA
aaggacagctgctcagcact

SEQ ID NO: 1419 - DNA, 20 bp, synthetic construct
  source 1..20: mol_type = other DNA
gtgaagttctatcccttggc

SEQ ID NO: 1420 - DNA, 20 bp, synthetic construct
  source 1..20: mol_type = other DNA
cacctgtgaagttctatccc

SEQ ID NO: 1421 - DNA, 20 bp, synthetic construct
  source 1..20: mol_type = other DNA
tttctcacctgtgaagttct

SEQ ID NO: 1422 - DNA, 20 bp, synthetic construct
  source 1..20: mol_type = other DNA
agcaggtagttgatgaacct

SEQ ID NO: 1423 - DNA, 20 bp, synthetic construct
  source 1..20: mol_type = other DNA
tgccatttaatgagcttcac

SEQ ID NO: 1424 - DNA, 20 bp, synthetic construct
  source 1..20: mol_type = other DNA
aactctgccatttaatgagc

SEQ ID NO: 1425 - DNA, 20 bp, synthetic construct
  source 1..20: mol_type = other DNA
atcccaactctgccatttaa

SEQ ID NO: 1426 - DNA, 20 bp, synthetic construct
  source 1..20: mol_type = other DNA
gaatgcactgagtttctgct

SEQ ID NO: 1427 - DNA, 20 bp, synthetic construct
  source 1..20: mol_type = other DNA
cactaattctgggcttccag

SEQ ID NO: 1428 - DNA, 20 bp, synthetic construct
  source 1..20: mol_type = other DNA
cagttcactaattctgggct

SEQ ID NO: 1429 - DNA, 20 bp, synthetic construct
  source 1..20: mol_type = other DNA
agccccagttcactaattct

SEQ ID NO: 1430 - DNA, 20 bp, synthetic construct
  source 1..20: mol_type = other DNA
gtttcagccccagttcacta

SEQ ID NO: 1431 - DNA, 20 bp, synthetic construct
  source 1..20: mol_type = other DNA
tggctgtttcagccccagtt

SEQ ID NO: 1432 - DNA, 20 bp, synthetic construct
  source 1..20: mol_type = other DNA
aagactggctgtttcagccc

SEQ ID NO: 1433 - DNA, 20 bp, synthetic construct
  source 1..20: mol_type = other DNA
aggtgaagactggctgtttc

SEQ ID NO: 1434 - DNA, 20 bp, synthetic construct
  source 1..20: mol_type = other DNA
cctaaaggtgaagactggct

SEQ ID NO: 1435 - DNA, 20 bp, synthetic construct
  source 1..20: mol_type = other DNA
ttgggcctaaaggtgaagac

SEQ ID NO: 1436 - DNA, 20 bp, synthetic construct
  source 1..20: mol_type = other DNA
cgttcttgggcctaaaggtg

SEQ ID NO: 1437 - DNA, 20 bp, synthetic construct
  source 1..20: mol_type = other DNA
aagcccgttcttgggcctaa

SEQ ID NO: 1438 - DNA, 20 bp, synthetic construct
  source 1..20: mol_type = other DNA
ttaagggttcatggatcccc

SEQ ID NO: 1439 - DNA, 20 bp, synthetic construct
  source 1..20: mol_type = other DNA
taattttaagggttcatgga

SEQ ID NO: 1440 - DNA, 20 bp, synthetic construct
  source 1..20: mol_type = other DNA
ctgtaagactttgaggacag

SEQ ID NO: 1441 - DNA, 20 bp, synthetic construct
  source 1..20: mol_type = other DNA
tgtccctgtaagactttgag

SEQ ID NO: 1442 - DNA, 20 bp, synthetic construct
  source 1..20: mol_type = other DNA
gttcttccaaccagtgtttg

SEQ ID NO: 1443 - DNA, 20 bp, synthetic construct
  source 1..20: mol_type = other DNA
gctcagttcttccaaccagt

SEQ ID NO: 1444 - DNA, 20 bp, synthetic construct
  source 1..20: mol_type = other DNA
agtttgctcagttcttccaa

SEQ ID NO: 1445 - DNA, 20 bp, synthetic construct
  source 1..20: mol_type = other DNA
tgtttagtttgctcagttct

SEQ ID NO: 1446 - DNA, 20 bp, synthetic construct
  source 1..20: mol_type = other DNA
aaatgcaagccatgttaggg

SEQ ID NO: 1447 - DNA, 20 bp, synthetic construct
  source 1..20: mol_type = other DNA
tggccaaatgcaagccatgt

SEQ ID NO: 1448 - DNA, 20 bp, synthetic construct
  source 1..20: mol_type = other DNA
gtaagtggccaaatgcaagc

SEQ ID NO: 1449 - DNA, 20 bp, synthetic construct
  source 1..20: mol_type = other DNA
ttctagtaagtggccaaatg

SEQ ID NO: 1450 - DNA, 20 bp, synthetic construct
  source 1..20: mol_type = other DNA
caggcctccacttccttttt

SEQ ID NO: 1451 - DNA, 20 bp, synthetic construct
  source 1..20: mol_type = other DNA
tcttctcatgtgaccccaag

SEQ ID NO: 1452 - DNA, 20 bp, synthetic construct
  source 1..20: mol_type = other DNA
tactttcttctcatgtgacc

SEQ ID NO: 1453 - DNA, 20 bp, synthetic construct
  source 1..20: mol_type = other DNA
cccagtactttcttctcatg

SEQ ID NO: 1454 - DNA, 20 bp, synthetic construct
  source 1..20: mol_type = other DNA
ctggtcccagtactttcttc

SEQ ID NO: 1455 - DNA, 20 bp, synthetic construct
  source 1..20: mol_type = other DNA
ttgtcctggtcccagtactt

SEQ ID NO: 1456 - DNA, 20 bp, synthetic construct
  source 1..20: mol_type = other DNA
ggttcttgtcctggtcccag

SEQ ID NO: 1457 - DNA, 20 bp, synthetic construct
  source 1..20: mol_type = other DNA
ccctgggttcttgtcctggt

SEQ ID NO: 1458 - DNA, 20 bp, synthetic construct
  source 1..20: mol_type = other DNA
ggagtccctgggttcttgtc

SEQ ID NO: 1459 - DNA, 20 bp, synthetic construct
  source 1..20: mol_type = other DNA
aggctggagtccctgggttc

SEQ ID NO: 1460 - DNA, 20 bp, synthetic construct
  source 1..20: mol_type = other DNA
ctgggaggctggagtccctg

SEQ ID NO: 1461 - DNA, 20 bp, synthetic construct
  source 1..20: mol_type = other DNA
accagccaggcccagaccca

SEQ ID NO: 1462 - DNA, 20 bp, synthetic construct
  source 1..20: mol_type = other DNA
tccctaccagccaggcccag

SEQ ID NO: 1463 - DNA, 20 bp, synthetic construct
  source 1..20: mol_type = other DNA
tcagctccctaccagccagg

SEQ ID NO: 1464 - DNA, 20 bp, synthetic construct
  source 1..20: mol_type = other DNA
gctgctcagctccctaccag

SEQ ID NO: 1465 - DNA, 20 bp, synthetic construct
  source 1..20: mol_type = other DNA
tacaagctgctcagctccct

SEQ ID NO: 1466 - DNA, 20 bp, synthetic construct
  source 1..20: mol_type = other DNA
tgttctacaagctgctcagc

SEQ ID NO: 1467 - DNA, 20 bp, synthetic construct
  source 1..20: mol_type = other DNA
gctggtgttctacaagctgc

SEQ ID NO: 1468 - DNA, 20 bp, synthetic construct
  source 1..20: mol_type = other DNA
cgtgagctggtgttctacaa

SEQ ID NO: 1469 - DNA, 20 bp, synthetic construct
  source 1..20: mol_type = other DNA
tctgatcaattattaaccta

SEQ ID NO: 1470 - DNA, 20 bp, synthetic construct
  source 1..20: mol_type = other DNA
tggatgtagactctccatga

SEQ ID NO: 1471 - DNA, 20 bp, synthetic construct
  source 1..20: mol_type = other DNA
aaggctggatgtagactctc

SEQ ID NO: 1472 - DNA, 20 bp, synthetic construct
  source 1..20: mol_type = other DNA
aagataaggctggatgtaga

SEQ ID NO: 1473 - DNA, 20 bp, synthetic construct
  source 1..20: mol_type = other DNA
gggagaagataaggctggat

SEQ ID NO: 1474 - DNA, 20 bp, synthetic construct
  source 1..20: mol_type = other DNA
cccatgggagaagataaggc

SEQ ID NO: 1475 - DNA, 20 bp, synthetic construct
  source 1..20: mol_type = other DNA
ggtttcccatgggagaagat

SEQ ID NO: 1476 - DNA, 20 bp, synthetic construct
  source 1..20: mol_type = other DNA
catgctctcttctcaccatg

SEQ ID NO: 1477 - DNA, 20 bp, synthetic construct
  source 1..20: mol_type = other DNA
gatgtcatgctctcttctca

SEQ ID NO: 1478 - DNA, 20 bp, synthetic construct
  source 1..20: mol_type = other DNA
ctctggatgtcatgctctct

SEQ ID NO: 1479 - DNA, 20 bp, synthetic construct
  source 1..20: mol_type = other DNA
ccaggtgctgtaggctgcct

SEQ ID NO: 1480 - DNA, 20 bp, synthetic construct
  source 1..20: mol_type = other DNA
tggtcccaggtgctgtaggc

SEQ ID NO: 1481 - DNA, 20 bp, synthetic construct
  source 1..20: mol_type = other DNA
cctggtggtcccaggtgctg

SEQ ID NO: 1482 - DNA, 20 bp, synthetic construct
  source 1..20: mol_type = other DNA
aggccaacccttgctgtgtg

SEQ ID NO: 1483 - DNA, 20 bp, synthetic construct
  source 1..20: mol_type = other DNA
aagggaggccaacccttgct

SEQ ID NO: 1484 - DNA, 20 bp, synthetic construct
  source 1..20: mol_type = other DNA
taggactttttccactgccc

SEQ ID NO: 1485 - DNA, 20 bp, synthetic construct
  source 1..20: mol_type = other DNA
ccttctaggactttttccac

SEQ ID NO: 1486 - DNA, 20 bp, synthetic construct
  source 1..20: mol_type = other DNA
gtttggtgggagaagcatgg

SEQ ID NO: 1487 - DNA, 20 bp, synthetic construct
  source 1..20: mol_type = other DNA
ctcatgtttggtgggagaag

SEQ ID NO: 1488 - DNA, 20 bp, synthetic construct
  source 1..20: mol_type = other DNA
aggtactcatgtttggtggg

SEQ ID NO: 1489 - DNA, 20 bp, synthetic construct
  source 1..20: mol_type = other DNA
gcagcaggtactcatgtttg

SEQ ID NO: 1490 - DNA, 20 bp, synthetic construct
  source 1..20: mol_type = other DNA
caagggcagcaggtactcat

SEQ ID NO: 1491 - DNA, 20 bp, synthetic construct
  source 1..20: mol_type = other DNA
acatatcatctcttgcctgt

SEQ ID NO: 1492 - DNA, 20 bp, synthetic construct
  source 1..20: mol_type = other DNA
tatctacatatcatctcttg

SEQ ID NO: 1493 - DNA, 20 bp, synthetic construct
  source 1..20: mol_type = other DNA
catactatctacatatcatc

SEQ ID NO: 1494 - DNA, 20 bp, synthetic construct
  source 1..20: mol_type = other DNA
aatatcatactatctacata

SEQ ID NO: 1495 - DNA, 20 bp, synthetic construct
  source 1..20: mol_type = other DNA
tccccaatatcatactatct

SEQ ID NO: 1496 - DNA, 20 bp, synthetic construct
  source 1..20: mol_type = other DNA
acctcagctcttcaagaagt

SEQ ID NO: 1497 - DNA, 20 bp, synthetic construct
  source 1..20: mol_type = other DNA
ctcagacctcagctcttcaa

SEQ ID NO: 1498 - DNA, 20 bp, synthetic construct
  source 1..20: mol_type = other DNA
cctatctcagacctcagctc

SEQ ID NO: 1499 - DNA, 20 bp, synthetic construct
  source 1..20: mol_type = other DNA
taaggcctatctcagacctc

SEQ ID NO: 1500 - DNA, 20 bp, synthetic construct
  source 1..20: mol_type = other DNA
acctttaaggcctatctcag

SEQ ID NO: 1501 - DNA, 20 bp, synthetic construct
  source 1..20: mol_type = other DNA
acccaacctttaaggcctat

SEQ ID NO: 1502 - DNA, 20 bp, synthetic construct
  source 1..20: mol_type = other DNA
tttttacccaacctttaagg

SEQ ID NO: 1503 - DNA, 20 bp, synthetic construct
  source 1..20: mol_type = other DNA
tccattttttacccaacctt

SEQ ID NO: 1504 - DNA, 20 bp, synthetic construct
  source 1..20: mol_type = other DNA
ctctttccattttttaccca

SEQ ID NO: 1505 - DNA, 20 bp, synthetic construct
  source 1..20: mol_type = other DNA
cttctctctttccatttttt

SEQ ID NO: 1506 - DNA, 20 bp, synthetic construct
  source 1..20: mol_type = other DNA
cagggcttctctctttccat

SEQ ID NO: 1507 - DNA, 20 bp, synthetic construct
  source 1..20: mol_type = other DNA
ctcagcagggcttctctctt

SEQ ID NO: 1508 - DNA, 20 bp, synthetic construct
  source 1..20: mol_type = other DNA
ctgccctcagcagggcttct

SEQ ID NO: 1509 - DNA, 20 bp, synthetic construct
  source 1..20: mol_type = other DNA
actagctgccctcagcaggg

SEQ ID NO: 1510 - DNA, 20 bp, synthetic construct
  source 1..20: mol_type = other DNA
ttgtgccatgcctgctttat

SEQ ID NO: 1511 - DNA, 20 bp, synthetic construct
  source 1..20: mol_type = other DNA
gcagagcccatcagcctccc

SEQ ID NO: 1512 - DNA, 20 bp, synthetic construct
  source 1..20: mol_type = other DNA
aaagcgcagagcccatcagc

SEQ ID NO: 1513 - DNA, 20 bp, synthetic construct
  source 1..20: mol_type = other DNA
ctggctcccttccaacataa

SEQ ID NO: 1514 - DNA, 20 bp, synthetic construct
  source 1..20: mol_type = other DNA
gagggctggctcccttccaa

SEQ ID NO: 1515 - DNA, 20 bp, synthetic construct
  source 1..20: mol_type = other DNA
aggaggagggctggctccct

SEQ ID NO: 1516 - DNA, 20 bp, synthetic construct
  source 1..20: mol_type = other DNA
tgcccaggaggagggctggc

SEQ ID NO: 1517 - DNA, 20 bp, synthetic construct
  source 1..20: mol_type = other DNA
taggctttagaaattcacca

SEQ ID NO: 1518 - DNA, 20 bp, synthetic construct
  source 1..20: mol_type = other DNA
caggtctgactctacagtcc

SEQ ID NO: 1519 - DNA, 20 bp, synthetic construct
  source 1..20: mol_type = other DNA
aaacacaggtctgactctac

SEQ ID NO: 1520 - DNA, 20 bp, synthetic construct
  source 1..20: mol_type = other DNA
gattcaaacacaggtctgac

SEQ ID NO: 1521 - DNA, 20 bp, synthetic construct
  source 1..20: mol_type = other DNA
gccaggattcaaacacaggt

SEQ ID NO: 1522 - DNA, 20 bp, synthetic construct
  source 1..20: mol_type = other DNA
gcagagccaggattcaaaca

SEQ ID NO: 1523 - DNA, 20 bp, synthetic construct
  source 1..20: mol_type = other DNA
cagtggcagagccaggattc

SEQ ID NO: 1524 - DNA, 20 bp, synthetic construct
  source 1..20: mol_type = other DNA
caggacagtggcagagccag

SEQ ID NO: 1525 - DNA, 20 bp, synthetic construct
  source 1..20: mol_type = other DNA
cccagcaggacagtggcaga

SEQ ID NO: 1526 - DNA, 20 bp, synthetic construct
  source 1..20: mol_type = other DNA
ggtcacccagcaggacagtg

SEQ ID NO: 1527 - DNA, 20 bp, synthetic construct
  source 1..20: mol_type = other DNA
cccaaggtcacccagcagga

SEQ ID NO: 1528 - DNA, 20 bp, synthetic construct
  source 1..20: mol_type = other DNA
acttgcccaaggtcacccag

SEQ ID NO: 1529 - DNA, 20 bp, synthetic construct
  source 1..20: mol_type = other DNA
agataacttgcccaaggtca

SEQ ID NO: 1530 - DNA, 20 bp, synthetic construct
  source 1..20: mol_type = other DNA
ttgccccattttagagataa

SEQ ID NO: 1531 - DNA, 20 bp, synthetic construct
  source 1..20: mol_type = other DNA
tgactttgccccattttaga

SEQ ID NO: 1532 - DNA, 20 bp, synthetic construct
  source 1..20: mol_type = other DNA
gcagggtgactttgccccat

SEQ ID NO: 1533 - DNA, 20 bp, synthetic construct
  source 1..20: mol_type = other DNA
tgagccactgtctcaagtgt

SEQ ID NO: 1534 - DNA, 20 bp, synthetic construct
  source 1..20: mol_type = other DNA
tgcctctgcatctcaagact

SEQ ID NO: 1535 - DNA, 20 bp, synthetic construct
  source 1..20: mol_type = other DNA
cccagtgcctctgcatctca

SEQ ID NO: 1536 - DNA, 20 bp, synthetic construct
  source 1..20: mol_type = other DNA
ccagcccagacactgtggat

SEQ ID NO: 1537 - DNA, 20 bp, synthetic construct
  source 1..20: mol_type = other DNA
agcacccagcccagacactg

SEQ ID NO: 1538 - DNA, 20 bp, synthetic construct
  source 1..20: mol_type = other DNA
tactgtcccctccttgtgtg

SEQ ID NO: 1539 - DNA, 20 bp, synthetic construct
  source 1..20: mol_type = other DNA
ttcagcttcttgtgaagctg

SEQ ID NO: 1540 - DNA, 20 bp, synthetic construct
  source 1..20: mol_type = other DNA
taggcttcagcttcttgtga

SEQ ID NO: 1541 - DNA, 20 bp, synthetic construct
  source 1..20: mol_type = other DNA
ggagataggcttcagcttct

SEQ ID NO: 1542 - DNA, 20 bp, synthetic construct
  source 1..20: mol_type = other DNA
ccaaaggagataggcttcag

SEQ ID NO: 1543 - DNA, 20 bp, synthetic construct
  source 1..20: mol_type = other DNA
agcagattcctgggacaaga

SEQ ID NO: 1544 - DNA, 20 bp, synthetic construct
  source 1..20: mol_type = other DNA
gagaaatagctacaggaatg

SEQ ID NO: 1545 - DNA, 20 bp, synthetic construct
  source 1..20: mol_type = other DNA
accctgagaaatagctacag

SEQ ID NO: 1546 - DNA, 20 bp, synthetic construct
  source 1..20: mol_type = other DNA
cacaaaccctgagaaatagc

SEQ ID NO: 1547 - DNA, 20 bp, synthetic construct
  source 1..20: mol_type = other DNA
aagactgggcttaggctaag

SEQ ID NO: 1548 - DNA, 20 bp, synthetic construct
  source 1..20: mol_type = other DNA
tcaggaaaaggagaaggaac

SEQ ID NO: 1549 - DNA, 20 bp, synthetic construct
  source 1..20: mol_type = other DNA
agcttcaaattttctgcagt

SEQ ID NO: 1550 - DNA, 20 bp, synthetic construct
  source 1..20: mol_type = other DNA
agtttctttacctccaaaat

SEQ ID NO: 1551 - DNA, 20 bp, synthetic construct
  source 1..20: mol_type = other DNA
atgcagcctggacaagtcct

SEQ ID NO: 1552 - DNA, 20 bp, synthetic construct
  source 1..20: mol_type = other DNA
agactatgcagcctggacaa

SEQ ID NO: 1553 - DNA, 20 bp, synthetic construct
  source 1..20: mol_type = other DNA
atactagactatgcagcctg

SEQ ID NO: 1554 - DNA, 20 bp, synthetic construct
  source 1..20: mol_type = other DNA
ccatcatactagactatgca

SEQ ID NO: 1555 - DNA, 20 bp, synthetic construct
  source 1..20: mol_type = other DNA
tgttgccatcatactagact

SEQ ID NO: 1556 - DNA, 20 bp, synthetic construct
  source 1..20: mol_type = other DNA
tgcaatgttgccatcatact

SEQ ID NO: 1557 - DNA, 20 bp, synthetic construct
  source 1..20: mol_type = other DNA
gtggttgcaatgttgccatc

SEQ ID NO: 1558 - DNA, 20 bp, synthetic construct
  source 1..20: mol_type = other DNA
ggatggtggttgcaatgttg

SEQ ID NO: 1559 - DNA, 20 bp, synthetic construct
  source 1..20: mol_type = other DNA
agcctggatggtggttgcaa

SEQ ID NO: 1560 - DNA, 20 bp, synthetic construct
  source 1..20: mol_type = other DNA
caataagcctggatggtggt

SEQ ID NO: 1561 - DNA, 20 bp, synthetic construct
  source 1..20: mol_type = other DNA
gaattcaataagcctggatg

SEQ ID NO: 1562 - DNA, 20 bp, synthetic construct
  source 1..20: mol_type = other DNA
tcagtggaaaagaacctggg

SEQ ID NO: 1563 - DNA, 20 bp, synthetic construct
  source 1..20: mol_type = other DNA
ggaaatcagtggaaaagaac

SEQ ID NO: 1564 - DNA, 20 bp, synthetic construct
  source 1..20: mol_type = other DNA
cagtaggaaatcagtggaaa

SEQ ID NO: 1565 - DNA, 20 bp, synthetic construct
  source 1..20: mol_type = other DNA
acaggcagtaggaaatcagt

SEQ ID NO: 1566 - DNA, 20 bp, synthetic construct
  source 1..20: mol_type = other DNA
gagaaacaggcagtaggaaa

SEQ ID NO: 1567 - DNA, 20 bp, synthetic construct
  source 1..20: mol_type = other DNA
gacccaggaagctggaatca

SEQ ID NO: 1568 - DNA, 20 bp, synthetic construct
  source 1..20: mol_type = other DNA
agggagacccaggaagctgg

SEQ ID NO: 1569 - DNA, 20 bp, synthetic construct
  source 1..20: mol_type = other DNA
actgagatctccagcagcaa

SEQ ID NO: 1570 - DNA, 20 bp, synthetic construct
  source 1..20: mol_type = other DNA
aatggagtgacagggcagga

SEQ ID NO: 1571 - DNA, 20 bp, synthetic construct
  source 1..20: mol_type = other DNA
agggagcaatggtggcaggt

SEQ ID NO: 1572 - DNA, 20 bp, synthetic construct
  source 1..20: mol_type = other DNA
tggacagggagcaatggtgg

SEQ ID NO: 1573 - DNA, 20 bp, synthetic construct
  source 1..20: mol_type = other DNA
tgcactggacagggagcaat

SEQ ID NO: 1574 - DNA, 20 bp, synthetic construct
  source 1..20: mol_type = other DNA
agccctgcactggacaggga

SEQ ID NO: 1575 - DNA, 20 bp, synthetic construct
  source 1..20: mol_type = other DNA
ttgtgtccccatgcccagca

SEQ ID NO: 1576 - DNA, 20 bp, synthetic construct
  source 1..20: mol_type = other DNA
ctgacttgtgtccccatgcc

SEQ ID NO: 1577 - DNA, 20 bp, synthetic construct
  source 1..20: mol_type = other DNA
cagggctgacttgtgtcccc

SEQ ID NO: 1578 - DNA, 20 bp, synthetic construct
  source 1..20: mol_type = other DNA
acaaagtctatcaggatgca

SEQ ID NO: 1579 - DNA, 20 bp, synthetic construct
  source 1..20: mol_type = other DNA
aagtgacaaagtctatcagg

SEQ ID NO: 1580 - DNA, 20 bp, synthetic construct
  source 1..20: mol_type = other DNA
gtctgcccatggccccatgg

SEQ ID NO: 1581 - DNA, 20 bp, synthetic construct
  source 1..20: mol_type = other DNA
agaaagtctgcccatggccc

SEQ ID NO: 1582 - DNA, 20 bp, synthetic construct
  source 1..20: mol_type = other DNA
gcttgagaaagtctgcccat

SEQ ID NO: 1583 - DNA, 20 bp, synthetic construct
  source 1..20: mol_type = other DNA
agcaggcttgagaaagtctg

SEQ ID NO: 1584 - DNA, 20 bp, synthetic construct
  source 1..20: mol_type = other DNA
ggctcagcaggcttgagaaa

SEQ ID NO: 1585 - DNA, 20 bp, synthetic construct
  source 1..20: mol_type = other DNA
gatgaggctcagcaggcttg

SEQ ID NO: 1586 - DNA, 20 bp, synthetic construct
  source 1..20: mol_type = other DNA
ttgcagatgaggctcagcag

SEQ ID NO: 1587 - DNA, 20 bp, synthetic construct
  source 1..20: mol_type = other DNA
ccattttgcagatgaggctc

SEQ ID NO: 1588 - DNA, 20 bp, synthetic construct
  source 1..20: mol_type = other DNA
cagctccattttgcagatga

SEQ ID NO: 1589 - DNA, 20 bp, synthetic construct
  source 1..20: mol_type = other DNA
agaacagtctatcatcactc

SEQ ID NO: 1590 - DNA, 20 bp, synthetic construct
  source 1..20: mol_type = other DNA
gaggtgagagagaaagcaga

SEQ ID NO: 1591 - DNA, 20 bp, synthetic construct
  source 1..20: mol_type = other DNA
cccctgaggtgagagagaaa

SEQ ID NO: 1592 - DNA, 20 bp, synthetic construct
  source 1..20: mol_type = other DNA
cctggcccctgaggtgagag

SEQ ID NO: 1593 - DNA, 20 bp, synthetic construct
  source 1..20: mol_type = other DNA
tggagcctggcccctgaggt

SEQ ID NO: 1594 - DNA, 20 bp, synthetic construct
  source 1..20: mol_type = other DNA
aacactggagcctggcccct

SEQ ID NO: 1595 - DNA, 20 bp, synthetic construct
  source 1..20: mol_type = other DNA
cagagaacactggagcctgg

SEQ ID NO: 1596 - DNA, 20 bp, synthetic construct
  source 1..20: mol_type = other DNA
ggcaacagagaacactggag

SEQ ID NO: 1597 - DNA, 20 bp, synthetic construct
  source 1..20: mol_type = other DNA
acagtggcaacagagaacac

SEQ ID NO: 1598 - DNA, 20 bp, synthetic construct
  source 1..20: mol_type = other DNA
caggccacagtggcaacaga

SEQ ID NO: 1599 - DNA, 20 bp, synthetic construct
  source 1..20: mol_type = other DNA
aggaccaggccacagtggca

SEQ ID NO: 1600 - DNA, 20 bp, synthetic construct
  source 1..20: mol_type = other DNA
tccagaggaccaggccacag

SEQ ID NO: 1601 - DNA, 20 bp, synthetic construct
  source 1..20: mol_type = other DNA
gggctactggcctcctggag

SEQ ID NO: 1602 - DNA, 20 bp, synthetic construct
  source 1..20: mol_type = other DNA
caaaggacacctgcctgtcc

SEQ ID NO: 1603 - DNA, 20 bp, synthetic construct
  source 1..20: mol_type = other DNA
gatagcaaaggacacctgcc

SEQ ID NO: 1604 - DNA, 20 bp, synthetic construct
  source 1..20: mol_type = other DNA
tcttttggaagggtggagat

SEQ ID NO: 1605 - DNA, 20 bp, synthetic construct
  source 1..20: mol_type = other DNA
ttggttcttttggaagggtg

SEQ ID NO: 1606 - DNA, 20 bp, synthetic construct
  source 1..20: mol_type = other DNA
gatgtgagaaggacacaggg

SEQ ID NO: 1607 - DNA, 20 bp, synthetic construct
  source 1..20: mol_type = other DNA
acagagatgtgagaaggaca

SEQ ID NO: 1608 - DNA, 20 bp, synthetic construct
  source 1..20: mol_type = other DNA
ttggaacagagatgtgagaa

SEQ ID NO: 1609 - DNA, 20 bp, synthetic construct
  source 1..20: mol_type = other DNA
acttcttggaacagagatgt

SEQ ID NO: 1610 - DNA, 20 bp, synthetic construct
  source 1..20: mol_type = other DNA
gccctcacagggccaggttg

SEQ ID NO: 1611 - DNA, 20 bp, synthetic construct
  source 1..20: mol_type = other DNA
ccccagggagccctcacagg

SEQ ID NO: 1612 - DNA, 20 bp, synthetic construct
  source 1..20: mol_type = other DNA
tagtgccccagggagccctc

SEQ ID NO: 1613 - DNA, 20 bp, synthetic construct
  source 1..20: mol_type = other DNA
tgtcctagtgccccagggag

SEQ ID NO: 1614 - DNA, 20 bp, synthetic construct
  source 1..20: mol_type = other DNA
tcaacaccccagcctgcctc

SEQ ID NO: 1615 - DNA, 20 bp, synthetic construct
  source 1..20: mol_type = other DNA
gaggctcaacaccccagcct

SEQ ID NO: 1616 - DNA, 20 bp, synthetic construct
  source 1..20: mol_type = other DNA
aggagggtcacacacacccc

SEQ ID NO: 1617 - DNA, 20 bp, synthetic construct
  source 1..20: mol_type = other DNA
gcaagaggccaggaaaaggg

SEQ ID NO: 1618 - DNA, 20 bp, synthetic construct
  source 1..20: mol_type = other DNA
tactggcaagaggccaggaa

SEQ ID NO: 1619 - DNA, 20 bp, synthetic construct
  source 1..20: mol_type = other DNA
atgattactggcaagaggcc

SEQ ID NO: 1620 - DNA, 20 bp, synthetic construct
  source 1..20: mol_type = other DNA
attacatgattactggcaag

SEQ ID NO: 1621 - DNA, 20 bp, synthetic construct
  source 1..20: mol_type = other DNA
aaaatatacatgctcttttt

SEQ ID NO: 1622 - DNA, 20 bp, synthetic construct
  source 1..20: mol_type = other DNA
actcaaaaatatacatgctc

SEQ ID NO: 1623 - DNA, 20 bp, synthetic construct
  source 1..20: mol_type = other DNA
tttctactcaaaaatataca

SEQ ID NO: 1624 - DNA, 20 bp, synthetic construct
  source 1..20: mol_type = other DNA
tcctttttctactcaaaaat

SEQ ID NO: 1625 - DNA, 20 bp, synthetic construct
  source 1..20: mol_type = other DNA
ttctgattagaaaaataata

SEQ ID NO: 1626 - DNA, 20 bp, synthetic construct
  source 1..20: mol_type = other DNA
ttttattctgattagaaaaa

SEQ ID NO: 1627 - DNA, 20 bp, synthetic construct
  source 1..20: mol_type = other DNA
tattctgctcataaaaacat

SEQ ID NO: 1628 - DNA, 20 bp, synthetic construct
  source 1..20: mol_type = other DNA
aagggtattctgctcataaa

SEQ ID NO: 1629 - DNA, 20 bp, synthetic construct
  source 1..20: mol_type = other DNA
tgagtaagggtattctgctc

SEQ ID NO: 1630 - DNA, 20 bp, synthetic construct
  source 1..20: mol_type = other DNA
gacaatgagtaagggtattc

SEQ ID NO: 1631 - DNA, 20 bp, synthetic construct
  source 1..20: mol_type = other DNA
agagagacaatgagtaaggg

SEQ ID NO: 1632 - DNA, 20 bp, synthetic construct
  source 1..20: mol_type = other DNA
ggctgagagagacaatgagt

SEQ ID NO: 1633 - DNA, 20 bp, synthetic construct
  source 1..20: mol_type = other DNA
agcctgtgacacctaccctg

SEQ ID NO: 1634 - DNA, 20 bp, synthetic construct
  source 1..20: mol_type = other DNA
atgcagtgtccctaaaccct

SEQ ID NO: 1635 - DNA, 20 bp, synthetic construct
  source 1..20: mol_type = other DNA
gggtgatgcagtgtccctaa

SEQ ID NO: 1636 - DNA, 20 bp, synthetic construct
  source 1..20: mol_type = other DNA
tggcttcctcagggcccacc

SEQ ID NO: 1637 - DNA, 20 bp, synthetic construct
  source 1..20: mol_type = other DNA
cctgacctgtggtactaagg

SEQ ID NO: 1638 - DNA, 20 bp, synthetic construct
  source 1..20: mol_type = other DNA
agccctgtgccagccagcct

SEQ ID NO: 1639 - DNA, 20 bp, synthetic construct
  source 1..20: mol_type = other DNA
gcgacagccctgtgccagcc

SEQ ID NO: 1640 - DNA, 20 bp, synthetic construct
  source 1..20: mol_type = other DNA
gacaagcgacagccctgtgc

SEQ ID NO: 1641 - DNA, 20 bp, synthetic construct
  source 1..20: mol_type = other DNA
ccacagtcagctgggctcag

SEQ ID NO: 1642 - DNA, 20 bp, synthetic construct
  source 1..20: mol_type = other DNA
ctttcccacagtcagctggg

SEQ ID NO: 1643 - DNA, 20 bp, synthetic construct
  source 1..20: mol_type = other DNA
ggaaactttcccacagtcag

SEQ ID NO: 1644 - DNA, 20 bp, synthetic construct
  source 1..20: mol_type = other DNA
caaatggaaactttcccaca

SEQ ID NO: 1645 - DNA, 20 bp, synthetic construct
  source 1..20: mol_type = other DNA
ggcctggaaaagggacactg

SEQ ID NO: 1646 - DNA, 20 bp, synthetic construct
  source 1..20: mol_type = other DNA
cccctggcctggaaaaggga

SEQ ID NO: 1647 - DNA, 20 bp, synthetic construct
  source 1..20: mol_type = other DNA
ctactcccctggcctggaaa

SEQ ID NO: 1648 - DNA, 20 bp, synthetic construct
  source 1..20: mol_type = other DNA
acctcctactcccctggcct

SEQ ID NO: 1649 - DNA, 20 bp, synthetic construct
  source 1..20: mol_type = other DNA
agcccacctcctactcccct

SEQ ID NO: 1650 - DNA, 20 bp, synthetic construct
  source 1..20: mol_type = other DNA
caggcagcccacctcctact

SEQ ID NO: 1651 - DNA, 20 bp, synthetic construct
  source 1..20: mol_type = other DNA
tgagacaggcagcccacctc

SEQ ID NO: 1652 - DNA, 20 bp, synthetic construct
  source 1..20: mol_type = other DNA
cagaatgagacaggcagccc

SEQ ID NO: 1653 - DNA, 20 bp, synthetic construct
  source 1..20: mol_type = other DNA
ctctgtgggctcctccacag

SEQ ID NO: 1654 - DNA, 20 bp, synthetic construct
  source 1..20: mol_type = other DNA
ctgtgctctgtgggctcctc

SEQ ID NO: 1655 - DNA, 20 bp, synthetic construct
  source 1..20: mol_type = other DNA
tggccctgtgctctgtgggc

SEQ ID NO: 1656 - DNA, 20 bp, synthetic construct
  source 1..20: mol_type = other DNA
ttacttggccctgtgctctg

SEQ ID NO: 1657 - DNA, 20 bp, synthetic construct
  source 1..20: mol_type = other DNA
actgtcagtctctccaaact

SEQ ID NO: 1658 - DNA, 20 bp, synthetic construct
  source 1..20: mol_type = other DNA
cccccactgtcagtctctcc

SEQ ID NO: 1659 - DNA, 20 bp, synthetic construct
  source 1..20: mol_type = other DNA
ctctgcccccactgtcagtc

SEQ ID NO: 1660 - DNA, 20 bp, synthetic construct
  source 1..20: mol_type = other DNA
gcaagctctgcccccactgt

SEQ ID NO: 1661 - DNA, 20 bp, synthetic construct
  source 1..20: mol_type = other DNA
tggctgcaagctctgccccc

SEQ ID NO: 1662 - DNA, 20 bp, synthetic construct
  source 1..20: mol_type = other DNA
ggccttggctgcaagctctg

SEQ ID NO: 1663 - DNA, 20 bp, synthetic construct
  source 1..20: mol_type = other DNA
aatccaacccttgtcactct

SEQ ID NO: 1664 - DNA, 20 bp, synthetic construct
  source 1..20: mol_type = other DNA
actcaaatccaacccttgtc

SEQ ID NO: 1665 - DNA, 20 bp, synthetic construct
  source 1..20: mol_type = other DNA
tattctaaaactcaaatcca

SEQ ID NO: 1666 - DNA, 20 bp, synthetic construct
  source 1..20: mol_type = other DNA
gtgattattctaaaactcaa

SEQ ID NO: 1667 - DNA, 20 bp, synthetic construct
  source 1..20: mol_type = other DNA
ccagagtgattattctaaaa

SEQ ID NO: 1668 - DNA, 20 bp, synthetic construct
  source 1..20: mol_type = other DNA
cctccctctgggcccatcct

SEQ ID NO: 1669 - DNA, 20 bp, synthetic construct
  source 1..20: mol_type = other DNA
tttgcactctgccagcctcc

SEQ ID NO: 1670 - DNA, 20 bp, synthetic construct
  source 1..20: mol_type = other DNA
tcttctttgcactctgccag

SEQ ID NO: 1671 - DNA, 20 bp, synthetic construct
  source 1..20: mol_type = other DNA
tgcccttgttcctctcagtc

SEQ ID NO: 1672 - DNA, 20 bp, synthetic construct
  source 1..20: mol_type = other DNA
atgtttgcccttgttcctct

SEQ ID NO: 1673 - DNA, 20 bp, synthetic construct
  source 1..20: mol_type = other DNA
gttgggcagtcaccatttgc

SEQ ID NO: 1674 - DNA, 20 bp, synthetic construct
  source 1..20: mol_type = other DNA
ctggtgttgggcagtcacca

SEQ ID NO: 1675 - DNA, 20 bp, synthetic construct
  source 1..20: mol_type = other DNA
cagtgctggtgttgggcagt

SEQ ID NO: 1676 - DNA, 20 bp, synthetic construct
  source 1..20: mol_type = other DNA
cagactctcatccccagggc

SEQ ID NO: 1677 - DNA, 20 bp, synthetic construct
  source 1..20: mol_type = other DNA
ggatgtgtcatttcccctgg

SEQ ID NO: 1678 - DNA, 20 bp, synthetic construct
  source 1..20: mol_type = other DNA
aggaaactggctgggagagg

SEQ ID NO: 1679 - DNA, 20 bp, synthetic construct
  source 1..20: mol_type = other DNA
gtcagaggaaactggctggg

SEQ ID NO: 1680 - DNA, 20 bp, synthetic construct
  source 1..20: mol_type = other DNA
cttgggtcagaggaaactgg

SEQ ID NO: 1681 - DNA, 20 bp, synthetic construct
  source 1..20: mol_type = other DNA
atgaccttgggtcagaggaa

SEQ ID NO: 1682 - DNA, 20 bp, synthetic construct
  source 1..20: mol_type = other DNA
caaggatgaccttgggtcag

SEQ ID NO: 1683 - DNA, 20 bp, synthetic construct
  source 1..20: mol_type = other DNA
agctgcaaggatgaccttgg

SEQ ID NO: 1684 - DNA, 20 bp, synthetic construct
  source 1..20: mol_type = other DNA
tcaccagctgcaaggatgac

SEQ ID NO: 1685 - DNA, 20 bp, synthetic construct
  source 1..20: mol_type = other DNA
aacagtgcccagcaggagca

SEQ ID NO: 1686 - DNA, 20 bp, synthetic construct
  source 1..20: mol_type = other DNA
ttgacaacagtgcccagcag

SEQ ID NO: 1687 - DNA, 20 bp, synthetic construct
  source 1..20: mol_type = other DNA
aggccttgacaacagtgccc

SEQ ID NO: 1688 - DNA, 20 bp, synthetic construct
  source 1..20: mol_type = other DNA
ggctcaggccttgacaacag

SEQ ID NO: 1689 - DNA, 20 bp, synthetic construct
  source 1..20: mol_type = other DNA
ggagaggctcaggccttgac

SEQ ID NO: 1690 - DNA, 20 bp, synthetic construct
  source 1..20: mol_type = other DNA
ggctccctgtgtcaccctgc

SEQ ID NO: 1691 - DNA, 20 bp, synthetic construct
  source 1..20: mol_type = other DNA
gtgttggctccctgtgtcac

SEQ ID NO: 1692 - DNA, 20 bp, synthetic construct
  source 1..20: mol_type = other DNA
atggtgtgttggctccctgt

SEQ ID NO: 1693 - DNA, 20 bp, synthetic construct
  source 1..20: mol_type = other DNA
aaggaatggtgtgttggctc

SEQ ID NO: 1694 - DNA, 20 bp, synthetic construct
  source 1..20: mol_type = other DNA
gcaccaaggaatggtgtgtt

SEQ ID NO: 1695 - DNA, 20 bp, synthetic construct
  source 1..20: mol_type = other DNA
gcccagcaccaaggaatggt

SEQ ID NO: 1696 - DNA, 20 bp, synthetic construct
  source 1..20: mol_type = other DNA
tgcaggcccagcaccaagga

SEQ ID NO: 1697 - DNA, 20 bp, synthetic construct
  source 1..20: mol_type = other DNA
cccaatgcaggcccagcacc

SEQ ID NO: 1698 - DNA, 20 bp, synthetic construct
  source 1..20: mol_type = other DNA
agggccctttccagaaaatc

SEQ ID NO: 1699 - DNA, 20 bp, synthetic construct
  source 1..20: mol_type = other DNA
cagggccctttccagaaaat

SEQ ID NO: 1700 - DNA, 20 bp, synthetic construct
  source 1..20: mol_type = other DNA
acagggccctttccagaaaa

SEQ ID NO: 1701 - DNA, 20 bp, synthetic construct
  source 1..20: mol_type = other DNA
cacagggccctttccagaaa

SEQ ID NO: 1702 - DNA, 20 bp, synthetic construct
  source 1..20: mol_type = other DNA
gccacagggccctttccaga

SEQ ID NO: 1703 - DNA, 20 bp, synthetic construct
  source 1..20: mol_type = other DNA
tgccacagggccctttccag

SEQ ID NO: 1704 - DNA, 20 bp, synthetic construct
  source 1..20: mol_type = other DNA
ctgccacagggccctttcca

SEQ ID NO: 1705 - DNA, 20 bp, synthetic construct
  source 1..20: mol_type = other DNA
cctgccacagggccctttcc

SEQ ID NO: 1706 - DNA, 20 bp, synthetic construct
  source 1..20: mol_type = other DNA
gaatatccctaataactaag

SEQ ID NO: 1707 - DNA, 20 bp, synthetic construct
  source 1..20: mol_type = other DNA
cgaatatccctaataactaa

SEQ ID NO: 1708 - DNA, 20 bp, synthetic construct
  source 1..20: mol_type = other DNA
tcgaatatccctaataacta

SEQ ID NO: 1709 - DNA, 20 bp, synthetic construct
  source 1..20: mol_type = other DNA
ctcgaatatccctaataact

SEQ ID NO: 1710 - DNA, 20 bp, synthetic construct
  source 1..20: mol_type = other DNA
ttctcgaatatccctaataa

SEQ ID NO: 1711 - DNA, 20 bp, synthetic construct
  source 1..20: mol_type = other DNA
gttctcgaatatccctaata

SEQ ID NO: 1712 - DNA, 20 bp, synthetic construct
  source 1..20: mol_type = other DNA
agttctcgaatatccctaat

SEQ ID NO: 1713 - DNA, 20 bp, synthetic construct
  source 1..20: mol_type = other DNA
gagttctcgaatatccctaa

SEQ ID NO: 1714 - DNA, 20 bp, synthetic construct
  source 1..20: mol_type = other DNA
aggagttctcgaatatccct

SEQ ID NO: 1715 - DNA, 20 bp, synthetic construct
  source 1..20: mol_type = other DNA
gaggagttctcgaatatccc

SEQ ID NO: 1716 - DNA, 20 bp, synthetic construct
  source 1..20: mol_type = other DNA
ggaggagttctcgaatatcc

SEQ ID NO: 1717 - DNA, 20 bp, synthetic construct
  source 1..20: mol_type = other DNA
gggaggagttctcgaatatc

SEQ ID NO: 1718 - DNA, 20 bp, synthetic construct
  source 1..20: mol_type = other DNA
gcagggtcctctccgctgcc

SEQ ID NO: 1719 - DNA, 20 bp, synthetic construct
  source 1..20: mol_type = other DNA
tgcagggtcctctccgctgc

SEQ ID NO: 1720 - DNA, 20 bp, synthetic construct
  source 1..20: mol_type = other DNA
gattcactgaggacctcagt

SEQ ID NO: 1721 - DNA, 20 bp, synthetic construct
  source 1..20: mol_type = other DNA
cgattcactgaggacctcag

SEQ ID NO: 1722 - DNA, 20 bp, synthetic construct
  source 1..20: mol_type = other DNA
gcgattcactgaggacctca

SEQ ID NO: 1723 - DNA, 20 bp, synthetic construct
  source 1..20: mol_type = other DNA
cgcgattcactgaggacctc

SEQ ID NO: 1724 - DNA, 20 bp, synthetic construct
  source 1..20: mol_type = other DNA
tgcgcgattcactgaggacc

SEQ ID NO: 1725 - DNA, 20 bp, synthetic construct
  source 1..20: mol_type = other DNA
ctgcgcgattcactgaggac

SEQ ID NO: 1726 - DNA, 20 bp, synthetic construct
  source 1..20: mol_type = other DNA
tctgcgcgattcactgagga

SEQ ID NO: 1727 - DNA, 20 bp, synthetic construct
  source 1..20: mol_type = other DNA
ctctgcgcgattcactgagg

SEQ ID NO: 1728 - DNA, 20 bp, synthetic construct
  source 1..20: mol_type = other DNA
cctcccacttcagtttctcc

SEQ ID NO: 1729 - DNA, 20 bp, synthetic construct
  source 1..20: mol_type = other DNA
tcctcccacttcagtttctc

SEQ ID NO: 1730 - DNA, 20 bp, synthetic construct
  source 1..20: mol_type = other DNA
ttcctcccacttcagtttct

SEQ ID NO: 1731 - DNA, 20 bp, synthetic construct
  source 1..20: mol_type = other DNA
cttcctcccacttcagtttc

SEQ ID NO: 1732 - DNA, 20 bp, synthetic construct
  source 1..20: mol_type = other DNA
tgcttcctcccacttcagtt

SEQ ID NO: 1733 - DNA, 20 bp, synthetic construct
  source 1..20: mol_type = other DNA
atgcttcctcccacttcagt

SEQ ID NO: 1734 - DNA, 20 bp, synthetic construct
  source 1..20: mol_type = other DNA
catgcttcctcccacttcag

SEQ ID NO: 1735 - DNA, 20 bp, synthetic construct
  source 1..20: mol_type = other DNA
gcatgcttcctcccacttca

SEQ ID NO: 1736 - DNA, 20 bp, synthetic construct
  source 1..20: mol_type = other DNA
aggcatgcttcctcccactt

SEQ ID NO: 1737 - DNA, 20 bp, synthetic construct
  source 1..20: mol_type = other DNA
taggcatgcttcctcccact

SEQ ID NO: 1738 - DNA, 20 bp, synthetic construct
  source 1..20: mol_type = other DNA
ttaggcatgcttcctcccac

SEQ ID NO: 1739 - DNA, 20 bp, synthetic construct
  source 1..20: mol_type = other DNA
cttaggcatgcttcctccca

SEQ ID NO: 1740 - DNA, 20 bp, synthetic construct
  source 1..20: mol_type = other DNA
aacttaggcatgcttcctcc

SEQ ID NO: 1741 - DNA, 20 bp, synthetic construct
  source 1..20: mol_type = other DNA
aaacttaggcatgcttcctc

SEQ ID NO: 1742 - DNA, 20 bp, synthetic construct
  source 1..20: mol_type = other DNA
aaaacttaggcatgcttcct

SEQ ID NO: 1743 - DNA, 20 bp, synthetic construct
  source 1..20: mol_type = other DNA
gaaaacttaggcatgcttcc

SEQ ID NO: 1744 - DNA, 20 bp, synthetic construct
  source 1..20: mol_type = other DNA
aggaaaacttaggcatgctt

SEQ ID NO: 1745 - DNA, 20 bp, synthetic construct
  source 1..20: mol_type = other DNA
aaggaaaacttaggcatgct

SEQ ID NO: 1746 - DNA, 20 bp, synthetic construct
  source 1..20: mol_type = other DNA
taaggaaaacttaggcatgc

SEQ ID NO: 1747 - DNA, 20 bp, synthetic construct
  source 1..20: mol_type = other DNA
ctaaggaaaacttaggcatg

SEQ ID NO: 1748 - DNA, 20 bp, synthetic construct
  source 1..20: mol_type = other DNA
agctaaggaaaacttaggca

SEQ ID NO: 1749 - DNA, 20 bp, synthetic construct
  source 1..20: mol_type = other DNA
cagctaaggaaaacttaggc

SEQ ID NO: 1750 - DNA, 20 bp, synthetic construct
  source 1..20: mol_type = other DNA
tcagctaaggaaaacttagg

SEQ ID NO: 1751 - DNA, 20 bp, synthetic construct
  source 1..20: mol_type = other DNA
atcagctaaggaaaacttag

SEQ ID NO: 1752 - DNA, 20 bp, synthetic construct
  source 1..20: mol_type = other DNA
tgtgatgacttcccagggtc

SEQ ID NO: 1753 - DNA, 20 bp, synthetic construct
  source 1..20: mol_type = other DNA
ctgtgatgacttcccagggt

SEQ ID NO: 1754 - DNA, 20 bp, synthetic construct
  source 1..20: mol_type = other DNA
gctgtgatgacttcccaggg

SEQ ID NO: 1755 - DNA, 20 bp, synthetic construct
  source 1..20: mol_type = other DNA
agctgtgatgacttcccagg

SEQ ID NO: 1756 - DNA, 20 bp, synthetic construct
  source 1..20: mol_type = other DNA
acagctgtgatgacttccca

SEQ ID NO: 1757 - DNA, 20 bp, synthetic construct
  source 1..20: mol_type = other DNA
gacagctgtgatgacttccc

SEQ ID NO: 1758 - DNA, 20 bp, synthetic construct
  source 1..20: mol_type = other DNA
ggacagctgtgatgacttcc

SEQ ID NO: 1759 - DNA, 20 bp, synthetic construct
  source 1..20: mol_type = other DNA
aggacagctgtgatgacttc

SEQ ID NO: 1760 - DNA, 20 bp, synthetic construct
  source 1..20: mol_type = other DNA
catgtcagagaggctcagca

SEQ ID NO: 1761 - DNA, 20 bp, synthetic construct
  source 1..20: mol_type = other DNA
ccatgtcagagaggctcagc

SEQ ID NO: 1762 - DNA, 20 bp, synthetic construct
  source 1..20: mol_type = other DNA
tccatgtcagagaggctcag

SEQ ID NO: 1763 - DNA, 20 bp, synthetic construct
  source 1..20: mol_type = other DNA
atccatgtcagagaggctca

SEQ ID NO: 1764 - DNA, 20 bp, synthetic construct
  source 1..20: mol_type = other DNA
aaatccatgtcagagaggct

SEQ ID NO: 1765 - DNA, 20 bp, synthetic construct
  source 1..20: mol_type = other DNA
aaaatccatgtcagagaggc

SEQ ID NO: 1766 - DNA, 20 bp, synthetic construct
  source 1..20: mol_type = other DNA
aaaaatccatgtcagagagg

SEQ ID NO: 1767 - DNA, 20 bp, synthetic construct
  source 1..20: mol_type = other DNA
gaaaaatccatgtcagagag

SEQ ID NO: 1768 - DNA, 20 bp, synthetic construct
  source 1..20: mol_type = other DNA
tggatagtcgatttaccaga

SEQ ID NO: 1769 - DNA, 20 bp, synthetic construct
  source 1..20: mol_type = other DNA
ttggatagtcgatttaccag

SEQ ID NO: 1770 - DNA, 20 bp, synthetic construct
  source 1..20: mol_type = other DNA
ctttggatagtcgatttacc

SEQ ID NO: 1771 - DNA, 20 bp, synthetic construct
  source 1..20: mol_type = other DNA
acctcgatgttacattaagg

SEQ ID NO: 1772 - DNA, 20 bp, synthetic construct
  source 1..20: mol_type = other DNA
aacctcgatgttacattaag

SEQ ID NO: 1773 - DNA, 20 bp, synthetic construct
  source 1..20: mol_type = other DNA
aaacctcgatgttacattaa

SEQ ID NO: 1774 - DNA, 20 bp, synthetic construct
  source 1..20: mol_type = other DNA
gaaacctcgatgttacatta

SEQ ID NO: 1775 - DNA, 20 bp, synthetic construct
  source 1..20: mol_type = other DNA
tattgcaaccactaggacat

SEQ ID NO: 1776 - DNA, 20 bp, synthetic construct
  source 1..20: mol_type = other DNA
ttattgcaaccactaggaca

SEQ ID NO: 1777 - DNA, 20 bp, synthetic construct
  source 1..20: mol_type = other DNA
gttattgcaaccactaggac

SEQ ID NO: 1778 - DNA, 20 bp, synthetic construct
  source 1..20: mol_type = other DNA
ggttattgcaaccactagga

SEQ ID NO: 1779 - DNA, 20 bp, synthetic construct
  source 1..20: mol_type = other DNA
tgggttattgcaaccactag

SEQ ID NO: 1780 - DNA, 20 bp, synthetic construct
  source 1..20: mol_type = other DNA
gtgggttattgcaaccacta

SEQ ID NO: 1781 - DNA, 20 bp, synthetic construct
  source 1..20: mol_type = other DNA
ggtgggttattgcaaccact

SEQ ID NO: 1782 - DNA, 20 bp, synthetic construct
  source 1..20: mol_type = other DNA
tcacagttaaagtgtggtac

SEQ ID NO: 1783 - DNA, 20 bp, synthetic construct
  source 1..20: mol_type = other DNA
gtcacagttaaagtgtggta

SEQ ID NO: 1784 - DNA, 20 bp, synthetic construct
  source 1..20: mol_type = other DNA
ggtcacagttaaagtgtggt

SEQ ID NO: 1785 - DNA, 20 bp, synthetic construct
  source 1..20: mol_type = other DNA
aggtcacagttaaagtgtgg

SEQ ID NO: 1786 - DNA, 20 bp, synthetic construct
  source 1..20: mol_type = other DNA
aatgcctaggtcacagttaa

SEQ ID NO: 1787 - DNA, 20 bp, synthetic construct
  source 1..20: mol_type = other DNA
caatgcctaggtcacagtta

SEQ ID NO: 1788 - DNA, 20 bp, synthetic construct
  source 1..20: mol_type = other DNA
ccaatgcctaggtcacagtt

SEQ ID NO: 1789 - DNA, 20 bp, synthetic construct
  source 1..20: mol_type = other DNA
gccaatgcctaggtcacagt

SEQ ID NO: 1790 - DNA, 20 bp, synthetic construct
  source 1..20: mol_type = other DNA
atgccaatgcctaggtcaca

SEQ ID NO: 1791 - DNA, 20 bp, synthetic construct
  source 1..20: mol_type = other DNA
aatgccaatgcctaggtcac

SEQ ID NO: 1792 - DNA, 20 bp, synthetic construct
  source 1..20: mol_type = other DNA
caatgccaatgcctaggtca

SEQ ID NO: 1793 - DNA, 20 bp, synthetic construct
  source 1..20: mol_type = other DNA
gcaatgccaatgcctaggtc

SEQ ID NO: 1794 - DNA, 20 bp, synthetic construct
  source 1..20: mol_type = other DNA
ccacagcgataatcacacaa

SEQ ID NO: 1795 - DNA, 20 bp, synthetic construct
  source 1..20: mol_type = other DNA
accacagcgataatcacaca

SEQ ID NO: 1796 - DNA, 20 bp, synthetic construct
  source 1..20: mol_type = other DNA
aaccacagcgataatcacac

SEQ ID NO: 1797 - DNA, 20 bp, synthetic construct
  source 1..20: mol_type = other DNA
taaccacagcgataatcaca

SEQ ID NO: 1798 - DNA, 20 bp, synthetic construct
  source 1..20: mol_type = other DNA
gcagggtctgccactctcta

SEQ ID NO: 1799 - DNA, 20 bp, synthetic construct
  source 1..20: mol_type = other DNA
agcagggtctgccactctct

SEQ ID NO: 1800 - DNA, 20 bp, synthetic construct
  source 1..20: mol_type = other DNA
gagcagggtctgccactctc

SEQ ID NO: 1801 - DNA, 20 bp, synthetic construct
  source 1..20: mol_type = other DNA
agagcagggtctgccactct

SEQ ID NO: 1802 - DNA, 20 bp, synthetic construct
  source 1..20: mol_type = other DNA
gcacagtcatcttgtgtaca

SEQ ID NO: 1803 - DNA, 20 bp, synthetic construct
  source 1..20: mol_type = other DNA
tgcacagtcatcttgtgtac

SEQ ID NO: 1804 - DNA, 20 bp, synthetic construct
  source 1..20: mol_type = other DNA
ctgcacagtcatcttgtgta

SEQ ID NO: 1805 - DNA, 20 bp, synthetic construct
  source 1..20: mol_type = other DNA
tctgcacagtcatcttgtgt

SEQ ID NO: 1806 - DNA, 20 bp, synthetic construct
  source 1..20: mol_type = other DNA
agatcactctgcacagtcat

SEQ ID NO: 1807 - DNA, 20 bp, synthetic construct
  source 1..20: mol_type = other DNA
cagatcactctgcacagtca

SEQ ID NO: 1808 - DNA, 20 bp, synthetic construct
  source 1..20: mol_type = other DNA
tcagatcactctgcacagtc

SEQ ID NO: 1809 - DNA, 20 bp, synthetic construct
  source 1..20: mol_type = other DNA
ctcagatcactctgcacagt

SEQ ID NO: 1810 - DNA, 20 bp, synthetic construct
  source 1..20: mol_type = other DNA
tgctcagatcactctgcaca

SEQ ID NO: 1811 - DNA, 20 bp, synthetic construct
  source 1..20: mol_type = other DNA
ttgctcagatcactctgcac

SEQ ID NO: 1812 - DNA, 20 bp, synthetic construct
  source 1..20: mol_type = other DNA
attgctcagatcactctgca

SEQ ID NO: 1813 - DNA, 20 bp, synthetic construct
  source 1..20: mol_type = other DNA
cattgctcagatcactctgc

SEQ ID NO: 1814 - DNA, 20 bp, synthetic construct
  source 1..20: mol_type = other DNA
cctcttccaggaagacttcc

SEQ ID NO: 1815 - DNA, 20 bp, synthetic construct
  source 1..20: mol_type = other DNA
acctcttccaggaagacttc

SEQ ID NO: 1816 - DNA, 20 bp, synthetic construct
  source 1..20: mol_type = other DNA
cacctcttccaggaagactt

SEQ ID NO: 1817 - DNA, 20 bp, synthetic construct
  source 1..20: mol_type = other DNA
tcacctcttccaggaagact

SEQ ID NO: 1818 - DNA, 20 bp, synthetic construct
  source 1..20: mol_type = other DNA
tgtcacctcttccaggaaga

SEQ ID NO: 1819 - DNA, 20 bp, synthetic construct
  source 1..20: mol_type = other DNA
atgtcacctcttccaggaag

SEQ ID NO: 1820 - DNA, 20 bp, synthetic construct
  source 1..20: mol_type = other DNA
aatgtcacctcttccaggaa

SEQ ID NO: 1821 - DNA, 20 bp, synthetic construct
  source 1..20: mol_type = other DNA
gaatgtcacctcttccagga

SEQ ID NO: 1822 - DNA, 20 bp, synthetic construct
  source 1..20: mol_type = other DNA
ctgaatgtcacctcttccag

SEQ ID NO: 1823 - DNA, 20 bp, synthetic construct
  source 1..20: mol_type = other DNA
actgaatgtcacctcttcca

SEQ ID NO: 1824 - DNA, 20 bp, synthetic construct
  source 1..20: mol_type = other DNA
gactgaatgtcacctcttcc

SEQ ID NO: 1825 - DNA, 20 bp, synthetic construct
  source 1..20: mol_type = other DNA
ggactgaatgtcacctcttc

SEQ ID NO: 1826 - DNA, 20 bp, synthetic construct
  source 1..20: mol_type = other DNA
ccggactgaatgtcacctct

SEQ ID NO: 1827 - DNA, 20 bp, synthetic construct
  source 1..20: mol_type = other DNA
tccggactgaatgtcacctc

SEQ ID NO: 1828 - DNA, 20 bp, synthetic construct
  source 1..20: mol_type = other DNA
atccggactgaatgtcacct

SEQ ID NO: 1829 - DNA, 20 bp, synthetic construct
  source 1..20: mol_type = other DNA
gatccggactgaatgtcacc

SEQ ID NO: 1830 - DNA, 20 bp, synthetic construct
  source 1..20: mol_type = other DNA
ctttccagatccggactgaa

SEQ ID NO: 1831 - DNA, 20 bp, synthetic construct
  source 1..20: mol_type = other DNA
tctttccagatccggactga

SEQ ID NO: 1832 - DNA, 20 bp, synthetic construct
  source 1..20: mol_type = other DNA
atctttccagatccggactg

SEQ ID NO: 1833 - DNA, 20 bp, synthetic construct
  source 1..20: mol_type = other DNA
catctttccagatccggact

SEQ ID NO: 1834 - DNA, 20 bp, synthetic construct
  source 1..20: mol_type = other DNA
ttcatctttccagatccgga

SEQ ID NO: 1835 - DNA, 20 bp, synthetic construct
  source 1..20: mol_type = other DNA
attcatctttccagatccgg

SEQ ID NO: 1836 - DNA, 20 bp, synthetic construct
  source 1..20: mol_type = other DNA
tattcatctttccagatccg

SEQ ID NO: 1837 - DNA, 20 bp, synthetic construct
  source 1..20: mol_type = other DNA
ctattcatctttccagatcc

SEQ ID NO: 1838 - DNA, 20 bp, synthetic construct
  source 1..20: mol_type = other DNA
ctcaagtcttcctcctgctg

SEQ ID NO: 1839 - DNA, 20 bp, synthetic construct
  source 1..20: mol_type = other DNA
tctcaagtcttcctcctgct

SEQ ID NO: 1840 - DNA, 20 bp, synthetic construct
  source 1..20: mol_type = other DNA
ctctcaagtcttcctcctgc

SEQ ID NO: 1841 - DNA, 20 bp, synthetic construct
  source 1..20: mol_type = other DNA
gctctcaagtcttcctcctg

SEQ ID NO: 1842 - DNA, 20 bp, synthetic construct
  source 1..20: mol_type = other DNA
gagctctcaagtcttcctcc

SEQ ID NO: 1843 - DNA, 20 bp, synthetic construct
  source 1..20: mol_type = other DNA
tgagctctcaagtcttcctc

SEQ ID NO: 1844 - DNA, 20 bp, synthetic construct
  source 1..20: mol_type = other DNA
atgagctctcaagtcttcct

SEQ ID NO: 1845 - DNA, 20 bp, synthetic construct
  source 1..20: mol_type = other DNA
catgagctctcaagtcttcc

SEQ ID NO: 1846 - DNA, 20 bp, synthetic construct
  source 1..20: mol_type = other DNA
cataatctgcacaggttctt

SEQ ID NO: 1847 - DNA, 20 bp, synthetic construct
  source 1..20: mol_type = other DNA
ccataatctgcacaggttct

SEQ ID NO: 1848 - DNA, 20 bp, synthetic construct
  source 1..20: mol_type = other DNA
accataatctgcacaggttc

SEQ ID NO: 1849 - DNA, 20 bp, synthetic construct
  source 1..20: mol_type = other DNA
caccataatctgcacaggtt

SEQ ID NO: 1850 - DNA, 20 bp, synthetic construct
  source 1..20: mol_type = other DNA
tgcaccataatctgcacagg

SEQ ID NO: 1851 - DNA, 20 bp, synthetic construct
  source 1..20: mol_type = other DNA
ctgcaccataatctgcacag

SEQ ID NO: 1852 - DNA, 20 bp, synthetic construct
  source 1..20: mol_type = other DNA
tctgcaccataatctgcaca

SEQ ID NO: 1853 - DNA, 20 bp, synthetic construct
  source 1..20: mol_type = other DNA
atctgcaccataatctgcac

SEQ ID NO: 1854 - DNA, 20 bp, synthetic construct
  source 1..20: mol_type = other DNA
taatccaggattgtcataag

SEQ ID NO: 1855 - DNA, 20 bp, synthetic construct
  source 1..20: mol_type = other DNA
ttaatccaggattgtcataa

SEQ ID NO: 1856 - DNA, 20 bp, synthetic construct
  source 1..20: mol_type = other DNA
tttaatccaggattgtcata

SEQ ID NO: 1857 - DNA, 20 bp, synthetic construct
  source 1..20: mol_type = other DNA
ctttaatccaggattgtcat

SEQ ID NO: 1858 - DNA, 20 bp, synthetic construct
  source 1..20: mol_type = other DNA
agctttaatccaggattgtc

SEQ ID NO: 1859 - DNA, 20 bp, synthetic construct
  source 1..20: mol_type = other DNA
tagctttaatccaggattgt

SEQ ID NO: 1860 - DNA, 20 bp, synthetic construct
  source 1..20: mol_type = other DNA
ttagctttaatccaggattg

SEQ ID NO: 1861 - DNA, 20 bp, synthetic construct
  source 1..20: mol_type = other DNA
cttagctttaatccaggatt

SEQ ID NO: 1862 - DNA, 20 bp, synthetic construct
  source 1..20: mol_type = other DNA
tccttagctttaatccagga

SEQ ID NO: 1863 - DNA, 20 bp, synthetic construct
  source 1..20: mol_type = other DNA
ctccttagctttaatccagg

SEQ ID NO: 1864 - DNA, 20 bp, synthetic construct
  source 1..20: mol_type = other DNA
cctccttagctttaatccag

SEQ ID NO: 1865 - DNA, 20 bp, synthetic construct
  source 1..20: mol_type = other DNA
tcctccttagctttaatcca

SEQ ID NO: 1866 - DNA, 20 bp, synthetic construct
  source 1..20: mol_type = other DNA
tgtcctccttagctttaatc

SEQ ID NO: 1867 - DNA, 20 bp, synthetic construct
  source 1..20: mol_type = other DNA
gtgtcctccttagctttaat

SEQ ID NO: 1868 - DNA, 20 bp, synthetic construct
  source 1..20: mol_type = other DNA
agtgtcctccttagctttaa

SEQ ID NO: 1869 - DNA, 20 bp, synthetic construct
  source 1..20: mol_type = other DNA
cagtgtcctccttagcttta

SEQ ID NO: 1870 - DNA, 20 bp, synthetic construct
  source 1..20: mol_type = other DNA
ctcagtgtcctccttagctt

SEQ ID NO: 1871 - DNA, 20 bp, synthetic construct
  source 1..20: mol_type = other DNA
actcagtgtcctccttagct

SEQ ID NO: 1872 - DNA, 20 bp, synthetic construct
  source 1..20: mol_type = other DNA
gactcagtgtcctccttagc

SEQ ID NO: 1873 - DNA, 20 bp, synthetic construct
  source 1..20: mol_type = other DNA
ggactcagtgtcctccttag

SEQ ID NO: 1874 - DNA, 20 bp, synthetic construct
  source 1..20: mol_type = other DNA
tgggactcagtgtcctcctt

SEQ ID NO: 1875 - DNA, 20 bp, synthetic construct
  source 1..20: mol_type = other DNA
ctgggactcagtgtcctcct

SEQ ID NO: 1876 - DNA, 20 bp, synthetic construct
  source 1..20: mol_type = other DNA
cctgggactcagtgtcctcc

SEQ ID NO: 1877 - DNA, 20 bp, synthetic construct
  source 1..20: mol_type = other DNA
ccctgggactcagtgtcctc

SEQ ID NO: 1878 - DNA, 20 bp, synthetic construct
  source 1..20: mol_type = other DNA
tcctgtttgatgggtaaaat

SEQ ID NO: 1879 - DNA, 20 bp, synthetic construct
  source 1..20: mol_type = other DNA
ctcctgtttgatgggtaaaa

SEQ ID NO: 1880 - DNA, 20 bp, synthetic construct
  source 1..20: mol_type = other DNA
tctcctgtttgatgggtaaa

SEQ ID NO: 1881 - DNA, 20 bp, synthetic construct
  source 1..20: mol_type = other DNA
ctctcctgtttgatgggtaa

SEQ ID NO: 1882 - DNA, 20 bp, synthetic construct
  source 1..20: mol_type = other DNA
tcctctcctgtttgatgggt

SEQ ID NO: 1883 - DNA, 20 bp, synthetic construct
  source 1..20: mol_type = other DNA
gtcctctcctgtttgatggg

SEQ ID NO: 1884 - DNA, 20 bp, synthetic construct
  source 1..20: mol_type = other DNA
tgtcctctcctgtttgatgg

SEQ ID NO: 1885 - DNA, 20 bp, synthetic construct
  source 1..20: mol_type = other DNA
gtgtcctctcctgtttgatg

SEQ ID NO: 1886 - DNA, 20 bp, synthetic construct
  source 1..20: mol_type = other DNA
cggtgtcctctcctgtttga

SEQ ID NO: 1887 - DNA, 20 bp, synthetic construct
  source 1..20: mol_type = other DNA
tcggtgtcctctcctgtttg

SEQ ID NO: 1888 - DNA, 20 bp, synthetic construct
  source 1..20: mol_type = other DNA
ctcggtgtcctctcctgttt

SEQ ID NO: 1889 - DNA, 20 bp, synthetic construct
  source 1..20: mol_type = other DNA
cctcggtgtcctctcctgtt

SEQ ID NO: 1890 - DNA, 20 bp, synthetic construct
  source 1..20: mol_type = other DNA
agcctcggtgtcctctcctg

SEQ ID NO: 1891 - DNA, 20 bp, synthetic construct
  source 1..20: mol_type = other DNA
aagcctcggtgtcctctcct

SEQ ID NO: 1892 - DNA, 20 bp, synthetic construct
  source 1..20: mol_type = other DNA
taagcctcggtgtcctctcc

SEQ ID NO: 1893 - DNA, 20 bp, synthetic construct
  source 1..20: mol_type = other DNA
gtaagcctcggtgtcctctc

SEQ ID NO: 1894 - DNA, 20 bp, synthetic construct
  source 1..20: mol_type = other DNA
aagtaagcctcggtgtcctc

SEQ ID NO: 1895 - DNA, 20 bp, synthetic construct
  source 1..20: mol_type = other DNA
caagtaagcctcggtgtcct

SEQ ID NO: 1896 - DNA, 20 bp, synthetic construct
  source 1..20: mol_type = other DNA
accaagtaagcctcggtgtc

SEQ ID NO: 1897 - DNA, 20 bp, synthetic construct
  source 1..20: mol_type = other DNA
ctcaccagattgttgtggga

SEQ ID NO: 1898 - DNA, 20 bp, synthetic construct
  source 1..20: mol_type = other DNA
cctcaccagattgttgtggg

SEQ ID NO: 1899 - DNA, 20 bp, synthetic construct
  source 1..20: mol_type = other DNA
acctcaccagattgttgtgg

SEQ ID NO: 1900 - DNA, 20 bp, synthetic construct
  source 1..20: mol_type = other DNA
tacctcaccagattgttgtg

SEQ ID NO: 1901 - DNA, 20 bp, synthetic construct
  source 1..20: mol_type = other DNA
taatacctacctcaccagat

SEQ ID NO: 1902 - DNA, 20 bp, synthetic construct
  source 1..20: mol_type = other DNA
ctaatacctacctcaccaga

SEQ ID NO: 1903 - DNA, 20 bp, synthetic construct
  source 1..20: mol_type = other DNA
gctaatacctacctcaccag

SEQ ID NO: 1904 - DNA, 20 bp, synthetic construct
  source 1..20: mol_type = other DNA
ggctaatacctacctcacca

SEQ ID NO: 1905 - DNA, 20 bp, synthetic construct
  source 1..20: mol_type = other DNA
cttcctcatctatacagtgg

SEQ ID NO: 1906 - DNA, 20 bp, synthetic construct
  source 1..20: mol_type = other DNA
gcttcctcatctatacagtg

SEQ ID NO: 1907 - DNA, 20 bp, synthetic construct
  source 1..20: mol_type = other DNA
agcttcctcatctatacagt

SEQ ID NO: 1908 - DNA, 20 bp, synthetic construct
  source 1..20: mol_type = other DNA
cagcttcctcatctatacag

SEQ ID NO: 1909 - DNA, 20 bp, synthetic construct
  source 1..20: mol_type = other DNA
ccatactggcatctggcagg

SEQ ID NO: 1910 - DNA, 20 bp, synthetic construct
  source 1..20: mol_type = other DNA
tccatactggcatctggcag

SEQ ID NO: 1911 - DNA, 20 bp, synthetic construct
  source 1..20: mol_type = other DNA
ctccatactggcatctggca

SEQ ID NO: 1912 - DNA, 20 bp, synthetic construct
  source 1..20: mol_type = other DNA
cctccatactggcatctggc

SEQ ID NO: 1913 - DNA, 20 bp, synthetic construct
  source 1..20: mol_type = other DNA
cacctccatactggcatctg

SEQ ID NO: 1914 - DNA, 20 bp, synthetic construct
  source 1..20: mol_type = other DNA
tcacctccatactggcatct

SEQ ID NO: 1915 - DNA, 20 bp, synthetic construct
  source 1..20: mol_type = other DNA
ctcacctccatactggcatc

SEQ ID NO: 1916 - DNA, 20 bp, synthetic construct
  source 1..20: mol_type = other DNA
cctcacctccatactggcat

SEQ ID NO: 1917 - DNA, 20 bp, synthetic construct
  source 1..20: mol_type = other DNA
cacctcacctccatactggc

SEQ ID NO: 1918 - DNA, 20 bp, synthetic construct
  source 1..20: mol_type = other DNA
ccacctcacctccatactgg

SEQ ID NO: 1919 - DNA, 20 bp, synthetic construct
  source 1..20: mol_type = other DNA
cccacctcacctccatactg

SEQ ID NO: 1920 - DNA, 20 bp, synthetic construct
  source 1..20: mol_type = other DNA
acccacctcacctccatact

SEQ ID NO: 1921 - DNA, 20 bp, synthetic construct
  source 1..20: mol_type = other DNA
ggatgcttaacttctgctga

SEQ ID NO: 1922 - DNA, 20 bp, synthetic construct
  source 1..20: mol_type = other DNA
aggatgcttaacttctgctg

SEQ ID NO: 1923 - DNA, 20 bp, synthetic construct
  source 1..20: mol_type = other DNA
taggatgcttaacttctgct

SEQ ID NO: 1924 - DNA, 20 bp, synthetic construct
  source 1..20: mol_type = other DNA
ttaggatgcttaacttctgc

SEQ ID NO: 1925 - DNA, 20 bp, synthetic construct
  source 1..20: mol_type = other DNA
agttaggatgcttaacttct

SEQ ID NO: 1926 - DNA, 20 bp, synthetic construct
  source 1..20: mol_type = other DNA
aagttaggatgcttaacttc

SEQ ID NO: 1927 - DNA, 20 bp, synthetic construct
  source 1..20: mol_type = other DNA
taagttaggatgcttaactt

SEQ ID NO: 1928 - DNA, 20 bp, synthetic construct
  source 1..20: mol_type = other DNA
ttaagttaggatgcttaact

SEQ ID NO: 1929 - DNA, 20 bp, synthetic construct
  source 1..20: mol_type = other DNA
tataggcctggatgcccaag

SEQ ID NO: 1930 - DNA, 20 bp, synthetic construct
  source 1..20: mol_type = other DNA
ctataggcctggatgcccaa

SEQ ID NO: 1931 - DNA, 20 bp, synthetic construct
  source 1..20: mol_type = other DNA
agatgatgtcctgcctcaga

SEQ ID NO: 1932 - DNA, 20 bp, synthetic construct
  source 1..20: mol_type = other DNA
cagatgatgtcctgcctcag

SEQ ID NO: 1933 - DNA, 20 bp, synthetic construct
  source 1..20: mol_type = other DNA
gcagatgatgtcctgcctca

SEQ ID NO: 1934 - DNA, 20 bp, synthetic construct
  source 1..20: mol_type = other DNA
agcagatgatgtcctgcctc

SEQ ID NO: 1935 - DNA, 20 bp, synthetic construct
  source 1..20: mol_type = other DNA
agtcaaaggtggcttcctgg

SEQ ID NO: 1936 - DNA, 20 bp, synthetic construct
  source 1..20: mol_type = other DNA
tagtcaaaggtggcttcctg

SEQ ID NO: 1937 - DNA, 20 bp, synthetic construct
  source 1..20: mol_type = other DNA
gtagtcaaaggtggcttcct

SEQ ID NO: 1938 - DNA, 20 bp, synthetic construct
  source 1..20: mol_type = other DNA
agtagtcaaaggtggcttcc

SEQ ID NO: 1939 - DNA, 20 bp, synthetic construct
  source 1..20: mol_type = other DNA
atgagtagtcaaaggtggct

SEQ ID NO: 1940 - DNA, 20 bp, synthetic construct
  source 1..20: mol_type = other DNA
aatgagtagtcaaaggtggc

SEQ ID NO: 1941 - DNA, 20 bp, synthetic construct
  source 1..20: mol_type = other DNA
gaatgagtagtcaaaggtgg

SEQ ID NO: 1942 - DNA, 20 bp, synthetic construct
  source 1..20: mol_type = other DNA
gcctggatgcccaagttaga

SEQ ID NO: 1943 - DNA, 20 bp, synthetic construct
  source 1..20: mol_type = other DNA
ggcctggatgcccaagttag

SEQ ID NO: 1944 - DNA, 20 bp, synthetic construct
  source 1..20: mol_type = other DNA
aggcctggatgcccaagtta

SEQ ID NO: 1945 - DNA, 20 bp, synthetic construct
  source 1..20: mol_type = other DNA
taggcctggatgcccaagtt

SEQ ID NO: 1946 - DNA, 20 bp, synthetic construct
  source 1..20: mol_type = other DNA
acaagtgggaaatgcagtct

SEQ ID NO: 1947 - DNA, 20 bp, synthetic construct
  source 1..20: mol_type = other DNA
aacaagtgggaaatgcagtc

SEQ ID NO: 1948 - DNA, 20 bp, synthetic construct
  source 1..20: mol_type = other DNA
caacaagtgggaaatgcagt

SEQ ID NO: 1949 - DNA, 20 bp, synthetic construct
  source 1..20: mol_type = other DNA
ccaacaagtgggaaatgcag

SEQ ID NO: 1950 - DNA, 20 bp, synthetic construct
  source 1..20: mol_type = other DNA
tgccaacaagtgggaaatgc

SEQ ID NO: 1951 - DNA, 20 bp, synthetic construct
  source 1..20: mol_type = other DNA
ctgccaacaagtgggaaatg

SEQ ID NO: 1952 - DNA, 20 bp, synthetic construct
  source 1..20: mol_type = other DNA
tctgccaacaagtgggaaat

SEQ ID NO: 1953 - DNA, 20 bp, synthetic construct
  source 1..20: mol_type = other DNA
ctctgccaacaagtgggaaa

SEQ ID NO: 1954 - DNA, 20 bp, synthetic construct
  source 1..20: mol_type = other DNA
gcttattaggtgtcttaaaa

SEQ ID NO: 1955 - DNA, 20 bp, synthetic construct
  source 1..20: mol_type = other DNA
agcttattaggtgtcttaaa

SEQ ID NO: 1956 - DNA, 20 bp, synthetic construct
  source 1..20: mol_type = other DNA
aagcttattaggtgtcttaa

SEQ ID NO: 1957 - DNA, 20 bp, synthetic construct
  source 1..20: mol_type = other DNA
taagcttattaggtgtctta

SEQ ID NO: 1958 - DNA, 20 bp, synthetic construct
  source 1..20: mol_type = other DNA
gctaagcttattaggtgtct

SEQ ID NO: 1959 - DNA, 20 bp, synthetic construct
  source 1..20: mol_type = other DNA
tgctaagcttattaggtgtc

SEQ ID NO: 1960 - DNA, 20 bp, synthetic construct
  source 1..20: mol_type = other DNA
ctgctaagcttattaggtgt

SEQ ID NO: 1961 - DNA, 20 bp, synthetic construct
  source 1..20: mol_type = other DNA
tctgctaagcttattaggtg

SEQ ID NO: 1962 - DNA, 20 bp, synthetic construct
  source 1..20: mol_type = other DNA
ccccatgcagcttggaggag

SEQ ID NO: 1963 - DNA, 20 bp, synthetic construct
  source 1..20: mol_type = other DNA
cccccatgcagcttggagga

SEQ ID NO: 1964 - DNA, 20 bp, synthetic construct
  source 1..20: mol_type = other DNA
gcccccatgcagcttggagg

SEQ ID NO: 1965 - DNA, 20 bp, synthetic construct
  source 1..20: mol_type = other DNA
agcccccatgcagcttggag

SEQ ID NO: 1966 - DNA, 20 bp, synthetic construct
  source 1..20: mol_type = other DNA
ccagcccccatgcagcttgg

SEQ ID NO: 1967 - DNA, 20 bp, synthetic construct
  source 1..20: mol_type = other DNA
gccagcccccatgcagcttg

SEQ ID NO: 1968 - DNA, 20 bp, synthetic construct
  source 1..20: mol_type = other DNA
ggccagcccccatgcagctt

SEQ ID NO: 1969 - DNA, 20 bp, synthetic construct
  source 1..20: mol_type = other DNA
gggccagcccccatgcagct

SEQ ID NO: 1970 - DNA, 20 bp, synthetic construct
  source 1..20: mol_type = other DNA
agtccaaacactcaggtagg

SEQ ID NO: 1971 - DNA, 20 bp, synthetic construct
  source 1..20: mol_type = other DNA
cagtccaaacactcaggtag

SEQ ID NO: 1972 - DNA, 20 bp, synthetic construct
  source 1..20: mol_type = other DNA
tcagtccaaacactcaggta

SEQ ID NO: 1973 - DNA, 20 bp, synthetic construct
  source 1..20: mol_type = other DNA
ttcagtccaaacactcaggt

SEQ ID NO: 1974 - DNA, 20 bp, synthetic construct
  source 1..20: mol_type = other DNA
gggaacagcagcatcagcat

SEQ ID NO: 1975 - DNA, 20 bp, synthetic construct
  source 1..20: mol_type = other DNA
tgggaacagcagcatcagca

SEQ ID NO: 1976 - DNA, 20 bp, synthetic construct
  source 1..20: mol_type = other DNA
ctgggaacagcagcatcagc

SEQ ID NO: 1977 - DNA, 20 bp, synthetic construct
  source 1..20: mol_type = other DNA
tctgggaacagcagcatcag

SEQ ID NO: 1978 - DNA, 20 bp, synthetic construct
  source 1..20: mol_type = other DNA
ggtctgggaacagcagcatc

SEQ ID NO: 1979 - DNA, 20 bp, synthetic construct
  source 1..20: mol_type = other DNA
tggtctgggaacagcagcat

SEQ ID NO: 1980 - DNA, 20 bp, synthetic construct
  source 1..20: mol_type = other DNA
gtggtctgggaacagcagca

SEQ ID NO: 1981 - DNA, 20 bp, synthetic construct
  source 1..20: mol_type = other DNA
caagtcatcttccagcagct

SEQ ID NO: 1982 - DNA, 20 bp, synthetic construct
  source 1..20: mol_type = other DNA
acaagtcatcttccagcagc

SEQ ID NO: 1983 - DNA, 20 bp, synthetic construct
  source 1..20: mol_type = other DNA
gacaagtcatcttccagcag

SEQ ID NO: 1984 - DNA, 20 bp, synthetic construct
  source 1..20: mol_type = other DNA
ggacaagtcatcttccagca

SEQ ID NO: 1985 - DNA, 20 bp, synthetic construct
  source 1..20: mol_type = other DNA
ctggacaagtcatcttccag

SEQ ID NO: 1986 - DNA, 20 bp, synthetic construct
  source 1..20: mol_type = other DNA
gctggacaagtcatcttcca

SEQ ID NO: 1987 - DNA, 20 bp, synthetic construct
  source 1..20: mol_type = other DNA
ggctggacaagtcatcttcc

SEQ ID NO: 1988 - DNA, 20 bp, synthetic construct
  source 1..20: mol_type = other DNA
gggctggacaagtcatcttc

SEQ ID NO: 1989 - DNA, 20 bp, synthetic construct
  source 1..20: mol_type = other DNA
atccttgagggtctcataac

SEQ ID NO: 1990 - DNA, 20 bp, synthetic construct
  source 1..20: mol_type = other DNA
tatccttgagggtctcataa

SEQ ID NO: 1991 - DNA, 20 bp, synthetic construct
  source 1..20: mol_type = other DNA
cttatccttgagggtctcat

SEQ ID NO: 1992 - DNA, 20 bp, synthetic construct
  source 1..20: mol_type = other DNA
tgcttatccttgagggtctc

SEQ ID NO: 1993 - DNA, 20 bp, synthetic construct
  source 1..20: mol_type = other DNA
atgcttatccttgagggtct

SEQ ID NO: 1994 - DNA, 20 bp, synthetic construct
  source 1..20: mol_type = other DNA
catgcttatccttgagggtc

SEQ ID NO: 1995 - DNA, 20 bp, synthetic construct
  source 1..20: mol_type = other DNA
acatgcttatccttgagggt

SEQ ID NO: 1996 - DNA, 20 bp, synthetic construct
  source 1..20: mol_type = other DNA
ctggatggcaacctaaggag

SEQ ID NO: 1997 - DNA, 20 bp, synthetic construct
  source 1..20: mol_type = other DNA
cctggatggcaacctaagga

SEQ ID NO: 1998 - DNA, 20 bp, synthetic construct
  source 1..20: mol_type = other DNA
gcctggatggcaacctaagg

SEQ ID NO: 1999 - DNA, 20 bp, synthetic construct
  source 1..20: mol_type = other DNA
ggcctggatggcaacctaag

SEQ ID NO: 2000 - DNA, 20 bp, synthetic construct
  source 1..20: mol_type = other DNA
ctggcctggatggcaaccta

SEQ ID NO: 2001 - DNA, 20 bp, synthetic construct
  source 1..20: mol_type = other DNA
tgctatgctgagagcacagg

SEQ ID NO: 2002 - DNA, 20 bp, synthetic construct
  source 1..20: mol_type = other DNA
ctgctatgctgagagcacag

SEQ ID NO: 2003 - DNA, 20 bp, synthetic construct
  source 1..20: mol_type = other DNA
cctgctatgctgagagcaca

SEQ ID NO: 2004 - DNA, 20 bp, synthetic construct
  source 1..20: mol_type = other DNA
acctgctatgctgagagcac

SEQ ID NO: 2005 - DNA, 20 bp, synthetic construct
  source 1..20: mol_type = other DNA
ctacctgctatgctgagagc

SEQ ID NO: 2006 - DNA, 20 bp, synthetic construct
  source 1..20: mol_type = other DNA
gctacctgctatgctgagag

SEQ ID NO: 2007 - DNA, 20 bp, synthetic construct
  source 1..20: mol_type = other DNA
agctacctgctatgctgaga

SEQ ID NO: 2008 - DNA, 20 bp, synthetic construct
  source 1..20: mol_type = other DNA
aagctacctgctatgctgag

SEQ ID NO: 2009 - DNA, 20 bp, synthetic construct
  source 1..20: mol_type = other DNA
gcaggttcatctgccttgac

SEQ ID NO: 2010 - DNA, 20 bp, synthetic construct
  source 1..20: mol_type = other DNA
agcaggttcatctgccttga

SEQ ID NO: 2011 - DNA, 20 bp, synthetic construct
  source 1..20: mol_type = other DNA
gagcaggttcatctgccttg

SEQ ID NO: 2012 - DNA, 20 bp, synthetic construct
  source 1..20: mol_type = other DNA
ggagcaggttcatctgcctt

SEQ ID NO: 2013 - DNA, 20 bp, synthetic construct
  source 1..20: mol_type = other DNA
ctgtgatgctctggagcagg

SEQ ID NO: 2014 - DNA, 20 bp, synthetic construct
  source 1..20: mol_type = other DNA
tctgtgatgctctggagcag

SEQ ID NO: 2015 - DNA, 20 bp, synthetic construct
  source 1..20: mol_type = other DNA
ctctgtgatgctctggagca

SEQ ID NO: 2016 - DNA, 20 bp, synthetic construct
  source 1..20: mol_type = other DNA
actctgtgatgctctggagc

SEQ ID NO: 2017 - DNA, 20 bp, synthetic construct
  source 1..20: mol_type = other DNA
gcactctgtgatgctctgga

SEQ ID NO: 2018 - DNA, 20 bp, synthetic construct
  source 1..20: mol_type = other DNA
tgcactctgtgatgctctgg

SEQ ID NO: 2019 - DNA, 20 bp, synthetic construct
  source 1..20: mol_type = other DNA
atgcactctgtgatgctctg

SEQ ID NO: 2020 - DNA, 20 bp, synthetic construct
  source 1..20: mol_type = other DNA
aatgcactctgtgatgctct

SEQ ID NO: 2021 - DNA, 20 bp, synthetic construct
  source 1..20: mol_type = other DNA
tgacatggtaagtcctgatg

SEQ ID NO: 2022 - DNA, 20 bp, synthetic construct
  source 1..20: mol_type = other DNA
ctgacatggtaagtcctgat

SEQ ID NO: 2023 - DNA, 20 bp, synthetic construct
  source 1..20: mol_type = other DNA
actgacatggtaagtcctga

SEQ ID NO: 2024 - DNA, 20 bp, synthetic construct
  source 1..20: mol_type = other DNA
cactgacatggtaagtcctg

SEQ ID NO: 2025 - DNA, 20 bp, synthetic construct
  source 1..20: mol_type = other DNA
agcactgacatggtaagtcc

SEQ ID NO: 2026 - DNA, 20 bp, synthetic construct
  source 1..20: mol_type = other DNA
cagcactgacatggtaagtc

SEQ ID NO: 2027 - DNA, 20 bp, synthetic construct
  source 1..20: mol_type = other DNA
tcagcactgacatggtaagt

SEQ ID NO: 2028 - DNA, 20 bp, synthetic construct
  source 1..20: mol_type = other DNA
ctcagcactgacatggtaag

SEQ ID NO: 2029 - DNA, 20 bp, synthetic construct
  source 1..20: mol_type = other DNA
ctgccatttaatgagcttca

SEQ ID NO: 2030 - DNA, 20 bp, synthetic construct
  source 1..20: mol_type = other DNA
tctgccatttaatgagcttc

SEQ ID NO: 2031 - DNA, 20 bp, synthetic construct
  source 1..20: mol_type = other DNA
ctctgccatttaatgagctt

SEQ ID NO: 2032 - DNA, 20 bp, synthetic construct
  source 1..20: mol_type = other DNA
actctgccatttaatgagct

SEQ ID NO: 2033 - DNA, 20 bp, synthetic construct
  source 1..20: mol_type = other DNA
caactctgccatttaatgag

SEQ ID NO: 2034 - DNA, 20 bp, synthetic construct
  source 1..20: mol_type = other DNA
ccaactctgccatttaatga

SEQ ID NO: 2035 - DNA, 20 bp, synthetic construct
  source 1..20: mol_type = other DNA
cccaactctgccatttaatg

SEQ ID NO: 2036 - DNA, 20 bp, synthetic construct
  source 1..20: mol_type = other DNA
tcccaactctgccatttaat

SEQ ID NO: 2037 - DNA, 20 bp, synthetic construct
  source 1..20: mol_type = other DNA
aatcccaactctgccattta

SEQ ID NO: 2038 - DNA, 20 bp, synthetic construct
  source 1..20: mol_type = other DNA
aaatcccaactctgccattt

SEQ ID NO: 2039 - DNA, 20 bp, synthetic construct
  source 1..20: mol_type = other DNA
tttaagggttcatggatccc

SEQ ID NO: 2040 - DNA, 20 bp, synthetic construct
  source 1..20: mol_type = other DNA
ttttaagggttcatggatcc

SEQ ID NO: 2041 - DNA, 20 bp, synthetic construct
  source 1..20: mol_type = other DNA
attttaagggttcatggatc

SEQ ID NO: 2042 - DNA, 20 bp, synthetic construct
  source 1..20: mol_type = other DNA
aattttaagggttcatggat

SEQ ID NO: 2043 - DNA, 20 bp, synthetic construct
  source 1..20: mol_type = other DNA
tggagtccctgggttcttgt

SEQ ID NO: 2044 - DNA, 20 bp, synthetic construct
  source 1..20: mol_type = other DNA
ctggagtccctgggttcttg

SEQ ID NO: 2045 - DNA, 20 bp, synthetic construct
  source 1..20: mol_type = other DNA
gctggagtccctgggttctt

SEQ ID NO: 2046 - DNA, 20 bp, synthetic construct
  source 1..20: mol_type = other DNA
ggctggagtccctgggttct

SEQ ID NO: 2047 - DNA, 20 bp, synthetic construct
  source 1..20: mol_type = other DNA
gaggctggagtccctgggtt

SEQ ID NO: 2048 - DNA, 20 bp, synthetic construct
  source 1..20: mol_type = other DNA
ggaggctggagtccctgggt

SEQ ID NO: 2049 - DNA, 20 bp, synthetic construct
  source 1..20: mol_type = other DNA
tgggaggctggagtccctgg

SEQ ID NO: 2050 - DNA, 20 bp, synthetic construct
  source 1..20: mol_type = other DNA
taccagccaggcccagaccc

SEQ ID NO: 2051 - DNA, 20 bp, synthetic construct
  source 1..20: mol_type = other DNA
ctaccagccaggcccagacc

SEQ ID NO: 2052 - DNA, 20 bp, synthetic construct
  source 1..20: mol_type = other DNA
cctaccagccaggcccagac

SEQ ID NO: 2053 - DNA, 20 bp, synthetic construct
  source 1..20: mol_type = other DNA
ccctaccagccaggcccaga

SEQ ID NO: 2054 - DNA, 20 bp, synthetic construct
  source 1..20: mol_type = other DNA
gtgttctacaagctgctcag

SEQ ID NO: 2055 - DNA, 20 bp, synthetic construct
  source 1..20: mol_type = other DNA
ggtgttctacaagctgctca

SEQ ID NO: 2056 - DNA, 20 bp, synthetic construct
  source 1..20: mol_type = other DNA
tggtgttctacaagctgctc

SEQ ID NO: 2057 - DNA, 20 bp, synthetic construct
  source 1..20: mol_type = other DNA
ctggtgttctacaagctgct

SEQ ID NO: 2058 - DNA, 20 bp, synthetic construct
  source 1..20: mol_type = other DNA
agctggtgttctacaagctg

SEQ ID NO: 2059 - DNA, 20 bp, synthetic construct
  source 1..20: mol_type = other DNA
gagctggtgttctacaagct

SEQ ID NO: 2060 - DNA, 20 bp, synthetic construct
  source 1..20: mol_type = other DNA
tgagctggtgttctacaagc

SEQ ID NO: 2061 - DNA, 20 bp, synthetic construct
  source 1..20: mol_type = other DNA
gtgagctggtgttctacaag

SEQ ID NO: 2062 - DNA, 20 bp, synthetic construct
  source 1..20: mol_type = other DNA
gtctgatcaattattaacct

SEQ ID NO: 2063 - DNA, 20 bp, synthetic construct
  source 1..20: mol_type = other DNA
ggtctgatcaattattaacc

SEQ ID NO: 2064 - DNA, 20 bp, synthetic construct
  source 1..20: mol_type = other DNA
gggtctgatcaattattaac

SEQ ID NO: 2065 - DNA, 20 bp, synthetic construct
  source 1..20: mol_type = other DNA
tgggtctgatcaattattaa

SEQ ID NO: 2066 - DNA, 20 bp, synthetic construct
  source 1..20: mol_type = other DNA
caggtactcatgtttggtgg

SEQ ID NO: 2067 - DNA, 20 bp, synthetic construct
  source 1..20: mol_type = other DNA
gcaggtactcatgtttggtg

SEQ ID NO: 2068 - DNA, 20 bp, synthetic construct
  source 1..20: mol_type = other DNA
agcaggtactcatgtttggt

SEQ ID NO: 2069 - DNA, 20 bp, synthetic construct
  source 1..20: mol_type = other DNA
cagcaggtactcatgtttgg

SEQ ID NO: 2070 - DNA, 20 bp, synthetic construct
  source 1..20: mol_type = other DNA
ggcagcaggtactcatgttt

SEQ ID NO: 2071 - DNA, 20 bp, synthetic construct
  source 1..20: mol_type = other DNA
gggcagcaggtactcatgtt

SEQ ID NO: 2072 - DNA, 20 bp, synthetic construct
  source 1..20: mol_type = other DNA
agggcagcaggtactcatgt

SEQ ID NO: 2073 - DNA, 20 bp, synthetic construct
  source 1..20: mol_type = other DNA
aagggcagcaggtactcatg

SEQ ID NO: 2074 - DNA, 20 bp, synthetic construct
  source 1..20: mol_type = other DNA
caatatcatactatctacat

SEQ ID NO: 2075 - DNA, 20 bp, synthetic construct
  source 1..20: mol_type = other DNA
ccaatatcatactatctaca

SEQ ID NO: 2076 - DNA, 20 bp, synthetic construct
  source 1..20: mol_type = other DNA
cccaatatcatactatctac

SEQ ID NO: 2077 - DNA, 20 bp, synthetic construct
  source 1..20: mol_type = other DNA
ccccaatatcatactatcta

SEQ ID NO: 2078 - DNA, 20 bp, synthetic construct
  source 1..20: mol_type = other DNA
ttccccaatatcatactatc

SEQ ID NO: 2079 - DNA, 20 bp, synthetic construct
  source 1..20: mol_type = other DNA
aacctttaaggcctatctca

SEQ ID NO: 2080 - DNA, 20 bp, synthetic construct
  source 1..20: mol_type = other DNA
caacctttaaggcctatctc

SEQ ID NO: 2081 - DNA, 20 bp, synthetic construct
  source 1..20: mol_type = other DNA
ccaacctttaaggcctatct

SEQ ID NO: 2082 - DNA, 20 bp, synthetic construct
  source 1..20: mol_type = other DNA
cccaacctttaaggcctatc

SEQ ID NO: 2083 - DNA, 20 bp, synthetic construct
  source 1..20: mol_type = other DNA
tacccaacctttaaggccta

SEQ ID NO: 2084 - DNA, 20 bp, synthetic construct
  source 1..20: mol_type = other DNA
ttacccaacctttaaggcct

SEQ ID NO: 2085 - DNA, 20 bp, synthetic construct
  source 1..20: mol_type = other DNA
tttacccaacctttaaggcc

SEQ ID NO: 2086 - DNA, 20 bp, synthetic construct
  source 1..20: mol_type = other DNA
ttttacccaacctttaaggc

SEQ ID NO: 2087 - DNA, 20 bp, synthetic construct
  source 1..20: mol_type = other DNA
ttttttacccaacctttaag

SEQ ID NO: 2088 - DNA, 20 bp, synthetic construct
  source 1..20: mol_type = other DNA
attttttacccaacctttaa

SEQ ID NO: 2089 - DNA, 20 bp, synthetic construct
  source 1..20: mol_type = other DNA
cattttttacccaaccttta

SEQ ID NO: 2090 - DNA, 20 bp, synthetic construct
  source 1..20: mol_type = other DNA
ccattttttacccaaccttt

SEQ ID NO: 2091 - DNA, 20 bp, synthetic construct
  source 1..20: mol_type = other DNA
ttccattttttacccaacct

SEQ ID NO: 2092 - DNA, 20 bp, synthetic construct
  source 1..20: mol_type = other DNA
tttccattttttacccaacc

SEQ ID NO: 2093 - DNA, 20 bp, synthetic construct
  source 1..20: mol_type = other DNA
ctttccattttttacccaac

SEQ ID NO: 2094 - DNA, 20 bp, synthetic construct
  source 1..20: mol_type = other DNA
tctttccattttttacccaa

SEQ ID NO: 2095 - DNA, 20 bp, synthetic construct
  source 1..20: mol_type = other DNA
ttaggctttagaaattcacc

SEQ ID NO: 2096 - DNA, 20 bp, synthetic construct
  source 1..20: mol_type = other DNA
attaggctttagaaattcac

SEQ ID NO: 2097 - DNA, 20 bp, synthetic construct
  source 1..20: mol_type = other DNA
tatgcagcctggacaagtcc

SEQ ID NO: 2098 - DNA, 20 bp, synthetic construct
  source 1..20: mol_type = other DNA
catactagactatgcagcct

SEQ ID NO: 2099 - DNA, 20 bp, synthetic construct
  source 1..20: mol_type = other DNA
tcatactagactatgcagcc

SEQ ID NO: 2100 - DNA, 20 bp, synthetic construct
  source 1..20: mol_type = other DNA
atcatactagactatgcagc

SEQ ID NO: 2101 - DNA, 20 bp, synthetic construct
  source 1..20: mol_type = other DNA
catcatactagactatgcag

SEQ ID NO: 2102 - DNA, 20 bp, synthetic construct
  source 1..20: mol_type = other DNA
gccatcatactagactatgc

SEQ ID NO: 2103 - DNA, 20 bp, synthetic construct
  source 1..20: mol_type = other DNA
tgccatcatactagactatg

SEQ ID NO: 2104 - DNA, 20 bp, synthetic construct
  source 1..20: mol_type = other DNA
ttgccatcatactagactat

SEQ ID NO: 2105 - DNA, 20 bp, synthetic construct
  source 1..20: mol_type = other DNA
gttgccatcatactagacta

SEQ ID NO: 2106 - DNA, 20 bp, synthetic construct
  source 1..20: mol_type = other DNA
atgttgccatcatactagac

SEQ ID NO: 2107 - DNA, 20 bp, synthetic construct
  source 1..20: mol_type = other DNA
aatgttgccatcatactaga

SEQ ID NO: 2108 - DNA, 20 bp, synthetic construct
  source 1..20: mol_type = other DNA
caatgttgccatcatactag

SEQ ID NO: 2109 - DNA, 20 bp, synthetic construct
  source 1..20: mol_type = other DNA
gcaatgttgccatcatacta

SEQ ID NO: 2110 - DNA, 20 bp, synthetic construct
  source 1..20: mol_type = other DNA
ttgcaatgttgccatcatac

SEQ ID NO: 2111 - DNA, 20 bp, synthetic construct
  source 1..20: mol_type = other DNA
gttgcaatgttgccatcata

SEQ ID NO: 2112 - DNA, 20 bp, synthetic construct
  source 1..20: mol_type = other DNA
ggttgcaatgttgccatcat

SEQ ID NO: 2113 - DNA, 20 bp, synthetic construct
  source 1..20: mol_type = other DNA
tggttgcaatgttgccatca

SEQ ID NO: 2114 - DNA, 20 bp, synthetic construct
  source 1..20: mol_type = other DNA
ggtggttgcaatgttgccat

SEQ ID NO: 2115 - DNA, 20 bp, synthetic construct
  source 1..20: mol_type = other DNA
tggtggttgcaatgttgcca

SEQ ID NO: 2116 - DNA, 20 bp, synthetic construct
  source 1..20: mol_type = other DNA
atggtggttgcaatgttgcc

SEQ ID NO: 2117 - DNA, 20 bp, synthetic construct
  source 1..20: mol_type = other DNA
gatggtggttgcaatgttgc

SEQ ID NO: 2118 - DNA, 20 bp, synthetic construct
  source 1..20: mol_type = other DNA
tggatggtggttgcaatgtt

SEQ ID NO: 2119 - DNA, 20 bp, synthetic construct
  source 1..20: mol_type = other DNA
ctggatggtggttgcaatgt

SEQ ID NO: 2120 - DNA, 20 bp, synthetic construct
  source 1..20: mol_type = other DNA
cctggatggtggttgcaatg

SEQ ID NO: 2121 - DNA, 20 bp, synthetic construct
  source 1..20: mol_type = other DNA
gcctggatggtggttgcaat

SEQ ID NO: 2122 - DNA, 20 bp, synthetic construct
  source 1..20: mol_type = other DNA
aagcctggatggtggttgca

SEQ ID NO: 2123 - DNA, 20 bp, synthetic construct
  source 1..20: mol_type = other DNA
taagcctggatggtggttgc

SEQ ID NO: 2124 - DNA, 20 bp, synthetic construct
  source 1..20: mol_type = other DNA
ataagcctggatggtggttg

SEQ ID NO: 2125 - DNA, 20 bp, synthetic construct
  source 1..20: mol_type = other DNA
aataagcctggatggtggtt

SEQ ID NO: 2126 - DNA, 20 bp, synthetic construct
  source 1..20: mol_type = other DNA
aactgagatctccagcagca

SEQ ID NO: 2127 - DNA, 20 bp, synthetic construct
  source 1..20: mol_type = other DNA
aaactgagatctccagcagc

SEQ ID NO: 2128 - DNA, 20 bp, synthetic construct
  source 1..20: mol_type = other DNA
taaactgagatctccagcag

SEQ ID NO: 2129 - DNA, 20 bp, synthetic construct
  source 1..20: mol_type = other DNA
ttaaactgagatctccagca

SEQ ID NO: 2130 - DNA, 20 bp, synthetic construct
  source 1..20: mol_type = other DNA
gacaaagtctatcaggatgc

SEQ ID NO: 2131 - DNA, 20 bp, synthetic construct
  source 1..20: mol_type = other DNA
tgacaaagtctatcaggatg

SEQ ID NO: 2132 - DNA, 20 bp, synthetic construct
  source 1..20: mol_type = other DNA
gtgacaaagtctatcaggat

SEQ ID NO: 2133 - DNA, 20 bp, synthetic construct
  source 1..20: mol_type = other DNA
agtgacaaagtctatcagga

SEQ ID NO: 2134 - DNA, 20 bp, synthetic construct
  source 1..20: mol_type = other DNA
aaagtgacaaagtctatcag

SEQ ID NO: 2135 - DNA, 20 bp, synthetic construct
  source 1..20: mol_type = other DNA
gaaagtgacaaagtctatca

SEQ ID NO: 2136 - DNA, 20 bp, synthetic construct
  source 1..20: mol_type = other DNA
agaaagtgacaaagtctatc

SEQ ID NO: 2137 - DNA, 20 bp, synthetic construct
  source 1..20: mol_type = other DNA
ctagtgccccagggagccct

SEQ ID NO: 2138 - DNA, 20 bp, synthetic construct
  source 1..20: mol_type = other DNA
cctagtgccccagggagccc

SEQ ID NO: 2139 - DNA, 20 bp, synthetic construct
  source 1..20: mol_type = other DNA
tcctagtgccccagggagcc

SEQ ID NO: 2140 - DNA, 20 bp, synthetic construct
  source 1..20: mol_type = other DNA
gtcctagtgccccagggagc

SEQ ID NO: 2141 - DNA, 20 bp, synthetic construct
  source 1..20: mol_type = other DNA
ttgtcctagtgccccaggga

SEQ ID NO: 2142 - DNA, 20 bp, synthetic construct
  source 1..20: mol_type = other DNA
tttgtcctagtgccccaggg

SEQ ID NO: 2143 - DNA, 20 bp, synthetic construct
  source 1..20: mol_type = other DNA
ttttgtcctagtgccccagg

SEQ ID NO: 2144 - DNA, 20 bp, synthetic construct
  source 1..20: mol_type = other DNA
gtattctgctcataaaaaca

SEQ ID NO: 2145 - DNA, 20 bp, synthetic construct
  source 1..20: mol_type = other DNA
ggtattctgctcataaaaac

SEQ ID NO: 2146 - DNA, 20 bp, synthetic construct
  source 1..20: mol_type = other DNA
gggtattctgctcataaaaa

SEQ ID NO: 2147 - DNA, 20 bp, synthetic construct
  source 1..20: mol_type = other DNA
agggtattctgctcataaaa

SEQ ID NO: 2148 - DNA, 20 bp, synthetic construct
  source 1..20: mol_type = other DNA
taagggtattctgctcataa

SEQ ID NO: 2149 - DNA, 20 bp, synthetic construct
  source 1..20: mol_type = other DNA
gtaagggtattctgctcata

SEQ ID NO: 2150 - DNA, 20 bp, synthetic construct
  source 1..20: mol_type = other DNA
agtaagggtattctgctcat

SEQ ID NO: 2151 - DNA, 20 bp, synthetic construct
  source 1..20: mol_type = other DNA
gagtaagggtattctgctca

SEQ ID NO: 2152 - DNA, 20 bp, synthetic construct
  source 1..20: mol_type = other DNA
agacaatgagtaagggtatt

SEQ ID NO: 2153 - DNA, 20 bp, synthetic construct
  source 1..20: mol_type = other DNA
gagacaatgagtaagggtat

SEQ ID NO: 2154 - DNA, 20 bp, synthetic construct
  source 1..20: mol_type = other DNA
agagacaatgagtaagggta

SEQ ID NO: 2155 - DNA, 20 bp, synthetic construct
  source 1..20: mol_type = other DNA
gagagacaatgagtaagggt

SEQ ID NO: 2156 - DNA, 20 bp, synthetic construct
  source 1..20: mol_type = other DNA
gagagagacaatgagtaagg

SEQ ID NO: 2157 - DNA, 20 bp, synthetic construct
  source 1..20: mol_type = other DNA
tgagagagacaatgagtaag

SEQ ID NO: 2158 - DNA, 20 bp, synthetic construct
  source 1..20: mol_type = other DNA
ctgagagagacaatgagtaa

SEQ ID NO: 2159 - DNA, 20 bp, synthetic construct
  source 1..20: mol_type = other DNA
agcgacagccctgtgccagc

SEQ ID NO: 2160 - DNA, 20 bp, synthetic construct
  source 1..20: mol_type = other DNA
aagcgacagccctgtgccag

SEQ ID NO: 2161 - DNA, 20 bp, synthetic construct
  source 1..20: mol_type = other DNA
caagcgacagccctgtgcca

SEQ ID NO: 2162 - DNA, 20 bp, synthetic construct
  source 1..20: mol_type = other DNA
acaagcgacagccctgtgcc

SEQ ID NO: 2163 - DNA, 20 bp, synthetic construct
  source 1..20: mol_type = other DNA
ggacaagcgacagccctgtg

SEQ ID NO: 2164 - DNA, 20 bp, synthetic construct
  source 1..20: mol_type = other DNA
aggacaagcgacagccctgt

SEQ ID NO: 2165 - DNA, 20 bp, synthetic construct
  source 1..20: mol_type = other DNA
atgagacaggcagcccacct

SEQ ID NO: 2166 - DNA, 20 bp, synthetic construct
  source 1..20: mol_type = other DNA
aatgagacaggcagcccacc

SEQ ID NO: 2167 - DNA, 20 bp, synthetic construct
  source 1..20: mol_type = other DNA
gaatgagacaggcagcccac

SEQ ID NO: 2168 - DNA, 20 bp, synthetic construct
  source 1..20: mol_type = other DNA
agaatgagacaggcagccca

SEQ ID NO: 2169 - DNA, 20 bp, synthetic construct
  source 1..20: mol_type = other DNA
acagaatgagacaggcagcc

SEQ ID NO: 2170 - DNA, 20 bp, synthetic construct
  source 1..20: mol_type = other DNA
cacagaatgagacaggcagc

SEQ ID NO: 2171 - DNA, 20 bp, synthetic construct
  source 1..20: mol_type = other DNA
tcacagaatgagacaggcag

SEQ ID NO: 2172 - DNA, 20 bp, synthetic construct
  source 1..20: mol_type = other DNA
gctctgtgggctcctccaca

SEQ ID NO: 2173 - DNA, 20 bp, synthetic construct
  source 1..20: mol_type = other DNA
tgctctgtgggctcctccac

SEQ ID NO: 2174 - DNA, 20 bp, synthetic construct
  source 1..20: mol_type = other DNA
gtgctctgtgggctcctcca

SEQ ID NO: 2175 - DNA, 20 bp, synthetic construct
  source 1..20: mol_type = other DNA
tgtgctctgtgggctcctcc

SEQ ID NO: 2176 - DNA, 20 bp, synthetic construct
  source 1..20: mol_type = other DNA
cctgtgctctgtgggctcct

SEQ ID NO: 2177 - DNA, 20 bp, synthetic construct
  source 1..20: mol_type = other DNA
ccctgtgctctgtgggctcc

SEQ ID NO: 2178 - DNA, 20 bp, synthetic construct
  source 1..20: mol_type = other DNA
gccctgtgctctgtgggctc

SEQ ID NO: 2179 - DNA, 20 bp, synthetic construct
  source 1..20: mol_type = other DNA
ggccctgtgctctgtgggct

SEQ ID NO: 2180 - DNA, 20 bp, synthetic construct
  source 1..20: mol_type = other DNA
ttggccctgtgctctgtggg

SEQ ID NO: 2181 - DNA, 20 bp, synthetic construct
  source 1..20: mol_type = other DNA
cttggccctgtgctctgtgg

SEQ ID NO: 2182 - DNA, 20 bp, synthetic construct
  source 1..20: mol_type = other DNA
acttggccctgtgctctgtg

SEQ ID NO: 2183 - DNA, 20 bp, synthetic construct
  source 1..20: mol_type = other DNA
tacttggccctgtgctctgt

SEQ ID NO: 2184 - DNA, 20 bp, synthetic construct
  source 1..20: mol_type = other DNA
cactgtcagtctctccaaac

SEQ ID NO: 2185 - DNA, 20 bp, synthetic construct
  source 1..20: mol_type = other DNA
ccactgtcagtctctccaaa

SEQ ID NO: 2186 - DNA, 20 bp, synthetic construct
  source 1..20: mol_type = other DNA
cccactgtcagtctctccaa

SEQ ID NO: 2187 - DNA, 20 bp, synthetic construct
  source 1..20: mol_type = other DNA
ccccactgtcagtctctcca

SEQ ID NO: 2188 - DNA, 20 bp, synthetic construct
  source 1..20: mol_type = other DNA
gcccccactgtcagtctctc

SEQ ID NO: 2189 - DNA, 20 bp, synthetic construct
  source 1..20: mol_type = other DNA
tgcccccactgtcagtctct

SEQ ID NO: 2190 - DNA, 20 bp, synthetic construct
  source 1..20: mol_type = other DNA
ctgcccccactgtcagtctc

SEQ ID NO: 2191 - DNA, 20 bp, synthetic construct
  source 1..20: mol_type = other DNA
tctgcccccactgtcagtct

SEQ ID NO: 2192 - DNA, 20 bp, synthetic construct
  source 1..20: mol_type = other DNA
ttggctgcaagctctgcccc

SEQ ID NO: 2193 - DNA, 20 bp, synthetic construct
  source 1..20: mol_type = other DNA
cttggctgcaagctctgccc

SEQ ID NO: 2194 - DNA, 20 bp, synthetic construct
  source 1..20: mol_type = other DNA
ccttggctgcaagctctgcc

SEQ ID NO: 2195 - DNA, 20 bp, synthetic construct
  source 1..20: mol_type = other DNA
gccttggctgcaagctctgc

SEQ ID NO: 2196 - DNA, 20 bp, synthetic construct
  source 1..20: mol_type = other DNA
gggccttggctgcaagctct

SEQ ID NO: 2197 - DNA, 20 bp, synthetic construct
  source 1..20: mol_type = other DNA
ttattctaaaactcaaatcc

SEQ ID NO: 2198 - DNA, 20 bp, synthetic construct
  source 1..20: mol_type = other DNA
attattctaaaactcaaatc

SEQ ID NO: 2199 - DNA, 20 bp, synthetic construct
  source 1..20: mol_type = other DNA
tgattattctaaaactcaaa

SEQ ID NO: 2200 - DNA, 20 bp, synthetic construct
  source 1..20: mol_type = other DNA
agtgattattctaaaactca

SEQ ID NO: 2201 - DNA, 20 bp, synthetic construct
  source 1..20: mol_type = other DNA
gagtgattattctaaaactc

SEQ ID NO: 2202 - DNA, 20 bp, synthetic construct
  source 1..20: mol_type = other DNA
agagtgattattctaaaact

SEQ ID NO: 2203 - DNA, 20 bp, synthetic construct
  source 1..20: mol_type = other DNA
cagagtgattattctaaaac

SEQ ID NO: 2204 - DNA, 20 bp, synthetic construct
  source 1..20: mol_type = other DNA
tgttgggcagtcaccatttg

SEQ ID NO: 2205 - DNA, 20 bp, synthetic construct
  source 1..20: mol_type = other DNA
gtgttgggcagtcaccattt

SEQ ID NO: 2206 - DNA, 20 bp, synthetic construct
  source 1..20: mol_type = other DNA
ggtgttgggcagtcaccatt

SEQ ID NO: 2207 - DNA, 20 bp, synthetic construct
  source 1..20: mol_type = other DNA
tggtgttgggcagtcaccat

SEQ ID NO: 2208 - DNA, 20 bp, synthetic construct
  source 1..20: mol_type = other DNA
ccttgggtcagaggaaactg

SEQ ID NO: 2209 - DNA, 20 bp, synthetic construct
  source 1..20: mol_type = other DNA
accttgggtcagaggaaact

SEQ ID NO: 2210 - DNA, 20 bp, synthetic construct
  source 1..20: mol_type = other DNA
gaccttgggtcagaggaaac

SEQ ID NO: 2211 - DNA, 20 bp, synthetic construct
  source 1..20: mol_type = other DNA
tgaccttgggtcagaggaaa

SEQ ID NO: 2212 - DNA, 20 bp, synthetic construct
  source 1..20: mol_type = other DNA
gatgaccttgggtcagagga

SEQ ID NO: 2213 - DNA, 20 bp, synthetic construct
  source 1..20: mol_type = other DNA
ggatgaccttgggtcagagg

SEQ ID NO: 2214 - DNA, 20 bp, synthetic construct
  source 1..20: mol_type = other DNA
aggatgaccttgggtcagag

SEQ ID NO: 2215 - DNA, 20 bp, synthetic construct
  source 1..20: mol_type = other DNA
aaggatgaccttgggtcaga

SEQ ID NO: 2216 - DNA, 20 bp, synthetic construct
  source 1..20: mol_type = other DNA
gcaaggatgaccttgggtca

SEQ ID NO: 2217 - DNA, 20 bp, synthetic construct
  source 1..20: mol_type = other DNA
tgcaaggatgaccttgggtc

SEQ ID NO: 2218 - DNA, 20 bp, synthetic construct
  source 1..20: mol_type = other DNA
ctgcaaggatgaccttgggt

SEQ ID NO: 2219 - DNA, 20 bp, synthetic construct
  source 1..20: mol_type = other DNA
gctgcaaggatgaccttggg

SEQ ID NO: 2220 - DNA, 20 bp, synthetic construct
  source 1..20: mol_type = other DNA
cagctgcaaggatgaccttg

SEQ ID NO: 2221 - DNA, 20 bp, synthetic construct
  source 1..20: mol_type = other DNA
ccagctgcaaggatgacctt

SEQ ID NO: 2222 - DNA, 20 bp, synthetic construct
  source 1..20: mol_type = other DNA
caccagctgcaaggatgacc

SEQ ID NO: 2223 - DNA, 20 bp, synthetic construct
  source 1..20: mol_type = other DNA
tgtgttggctccctgtgtca

SEQ ID NO: 2224 - DNA, 20 bp, synthetic construct
  source 1..20: mol_type = other DNA
gtgtgttggctccctgtgtc

SEQ ID NO: 2225 - DNA, 20 bp, synthetic construct
  source 1..20: mol_type = other DNA
ggtgtgttggctccctgtgt

SEQ ID NO: 2226 - DNA, 20 bp, synthetic construct
  source 1..20: mol_type = other DNA
tggtgtgttggctccctgtg

SEQ ID NO: 2227 - DNA, 20 bp, synthetic construct
  source 1..20: mol_type = other DNA
aatggtgtgttggctccctg

SEQ ID NO: 2228 - DNA, 20 bp, synthetic construct
  source 1..20: mol_type = other DNA
gaatggtgtgttggctccct

SEQ ID NO: 2229 - DNA, 20 bp, synthetic construct
  source 1..20: mol_type = other DNA
ggaatggtgtgttggctccc

SEQ ID NO: 2230 - DNA, 20 bp, synthetic construct
  source 1..20: mol_type = other DNA
aggaatggtgtgttggctcc

SEQ ID NO: 2231 - DNA, 20 bp, synthetic construct
  source 1..20: mol_type = other DNA
caaggaatggtgtgttggct

SEQ ID NO: 2232 - DNA, 20 bp, synthetic construct
  source 1..20: mol_type = other DNA
ccaaggaatggtgtgttggc

SEQ ID NO: 2233 - DNA, 20 bp, synthetic construct
  source 1..20: mol_type = other DNA
accaaggaatggtgtgttgg

SEQ ID NO: 2234 - DNA, 20 bp, synthetic construct
  source 1..20: mol_type = other DNA
caccaaggaatggtgtgttg

SEQ ID NO: 2235 - DNA, 20 bp, synthetic construct
  source 1..20: mol_type = other DNA
agcaccaaggaatggtgtgt

SEQ ID NO: 2236 - DNA, 20 bp, synthetic construct
  source 1..20: mol_type = other DNA
cagcaccaaggaatggtgtg

SEQ ID NO: 2237 - DNA, 20 bp, synthetic construct
  source 1..20: mol_type = other DNA
ccagcaccaaggaatggtgt

SEQ ID NO: 2238 - DNA, 20 bp, synthetic construct
  source 1..20: mol_type = other DNA
cccagcaccaaggaatggtg

SEQ ID NO: 2239 - DNA, 20 bp, synthetic construct
  source 1..20: mol_type = other DNA
ggcccagcaccaaggaatgg

SEQ ID NO: 2240 - DNA, 20 bp, synthetic construct
  source 1..20: mol_type = other DNA
aggcccagcaccaaggaatg

SEQ ID NO: 2241 - DNA, 20 bp, synthetic construct
  source 1..20: mol_type = other DNA
caggcccagcaccaaggaat

SEQ ID NO: 2242 - DNA, 20 bp, synthetic construct
  source 1..20: mol_type = other DNA
gcaggcccagcaccaaggaa

SEQ ID NO: 2243 - DNA, 20 bp, synthetic construct
  source 1..20: mol_type = other DNA
atgcaggcccagcaccaagg

SEQ ID NO: 2244 - DNA, 20 bp, synthetic construct
  source 1..20: mol_type = other DNA
aatgcaggcccagcaccaag

SEQ ID NO: 2245 - DNA, 20 bp, synthetic construct
  source 1..20: mol_type = other DNA
caatgcaggcccagcaccaa

SEQ ID NO: 2246 - DNA, 20 bp, synthetic construct
  source 1..20: mol_type = other DNA
ccaatgcaggcccagcacca

SEQ ID NO: 2247 - DNA, 20 bp, synthetic construct
  source 1..20: mol_type = other DNA
ctgaacttcccctcccaaac

SEQ ID NO: 2248 - DNA, 20 bp, synthetic construct
  source 1..20: mol_type = other DNA
caaatctgaacttcccctcc

SEQ ID NO: 2249 - DNA, 20 bp, synthetic construct
  source 1..20: mol_type = other DNA
aaatgcaaatctgaacttcc

SEQ ID NO: 2250 - DNA, 20 bp, synthetic construct
  source 1..20: mol_type = other DNA
gcagctccaaggatcatttt

SEQ ID NO: 2251 - DNA, 20 bp, synthetic construct
  source 1..20: mol_type = other DNA
atccagcagctccaaggatc

SEQ ID NO: 2252 - DNA, 20 bp, synthetic construct
  source 1..20: mol_type = other DNA
cttccatccagcagctccaa

SEQ ID NO: 2253 - DNA, 20 bp, synthetic construct
  source 1..20: mol_type = other DNA
cccatcttccatccagcagc

SEQ ID NO: 2254 - DNA, 20 bp, synthetic construct
  source 1..20: mol_type = other DNA
tctaacccatcttccatcca

SEQ ID NO: 2255 - DNA, 20 bp, synthetic construct
  source 1..20: mol_type = other DNA
atttttctaacccatcttcc

SEQ ID NO: 2256 - DNA, 20 bp, synthetic construct
  source 1..20: mol_type = other DNA
cttccatttttctaacccat

SEQ ID NO: 2257 - DNA, 20 bp, synthetic construct
  source 1..20: mol_type = other DNA
gccactggctaccaaaacag

SEQ ID NO: 2258 - DNA, 20 bp, synthetic construct
  source 1..20: mol_type = other DNA
tccaagccactggctaccaa

SEQ ID NO: 2259 - DNA, 20 bp, synthetic construct
  source 1..20: mol_type = other DNA
cttggtccaagccactggct

SEQ ID NO: 2260 - DNA, 20 bp, synthetic construct
  source 1..20: mol_type = other DNA
actcccttggtccaagccac

SEQ ID NO: 2261 - DNA, 20 bp, synthetic construct
  source 1..20: mol_type = other DNA
ctgctactcccttggtccaa

SEQ ID NO: 2262 - DNA, 20 bp, synthetic construct
  source 1..20: mol_type = other DNA
ctccactgctactcccttgg

SEQ ID NO: 2263 - DNA, 20 bp, synthetic construct
  source 1..20: mol_type = other DNA
tccatctccactgctactcc

SEQ ID NO: 2264 - DNA, 20 bp, synthetic construct
  source 1..20: mol_type = other DNA
tctcttccatctccactgct

SEQ ID NO: 2265 - DNA, 20 bp, synthetic construct
  source 1..20: mol_type = other DNA
gcacatctcttccatctcca

SEQ ID NO: 2266 - DNA, 20 bp, synthetic construct
  source 1..20: mol_type = other DNA
atcatgcacatctcttccat

SEQ ID NO: 2267 - DNA, 20 bp, synthetic construct
  source 1..20: mol_type = other DNA
tatttctgaaatttttccca

SEQ ID NO: 2268 - DNA, 20 bp, synthetic construct
  source 1..20: mol_type = other DNA
aatgctatttctgaaatttt

SEQ ID NO: 2269 - DNA, 20 bp, synthetic construct
  source 1..20: mol_type = other DNA
caatccattcctatgtcctg

SEQ ID NO: 2270 - DNA, 20 bp, synthetic construct
  source 1..20: mol_type = other DNA
atacccaatccattcctatg

SEQ ID NO: 2271 - DNA, 20 bp, synthetic construct
  source 1..20: mol_type = other DNA
tctccatacccaatccattc

SEQ ID NO: 2272 - DNA, 20 bp, synthetic construct
  source 1..20: mol_type = other DNA
ctgcatctccatacccaatc

SEQ ID NO: 2273 - DNA, 20 bp, synthetic construct
  source 1..20: mol_type = other DNA
tcctgctgcatctccatacc

SEQ ID NO: 2274 - DNA, 20 bp, synthetic construct
  source 1..20: mol_type = other DNA
tcttatcctgctgcatctcc

SEQ ID NO: 2275 - DNA, 20 bp, synthetic construct
  source 1..20: mol_type = other DNA
tattttcttatcctgctgca

SEQ ID NO: 2276 - DNA, 20 bp, synthetic construct
  source 1..20: mol_type = other DNA
tgctttattttcttatcctg

SEQ ID NO: 2277 - DNA, 20 bp, synthetic construct
  source 1..20: mol_type = other DNA
accagcatttatgatctgtg

SEQ ID NO: 2278 - DNA, 20 bp, synthetic construct
  source 1..20: mol_type = other DNA
gacatgctttaaaaagtgta

SEQ ID NO: 2279 - DNA, 20 bp, synthetic construct
  source 1..20: mol_type = other DNA
aatgtgacatgctttaaaaa

SEQ ID NO: 2280 - DNA, 20 bp, synthetic construct
  source 1..20: mol_type = other DNA
agccattcctgcctctctga

SEQ ID NO: 2281 - DNA, 20 bp, synthetic construct
  source 1..20: mol_type = other DNA
gggcaagccattcctgcctc

SEQ ID NO: 2282 - DNA, 20 bp, synthetic construct
  source 1..20: mol_type = other DNA
gctctgggcaagccattcct

SEQ ID NO: 2283 - DNA, 20 bp, synthetic construct
  source 1..20: mol_type = other DNA
gctctgctctgggcaagcca

SEQ ID NO: 2284 - DNA, 20 bp, synthetic construct
  source 1..20: mol_type = other DNA
cttttgctctgctctgggca

SEQ ID NO: 2285 - DNA, 20 bp, synthetic construct
  source 1..20: mol_type = other DNA
ctttgcttttgctctgctct

SEQ ID NO: 2286 - DNA, 20 bp, synthetic construct
  source 1..20: mol_type = other DNA
aacatctttgcttttgctct

SEQ ID NO: 2287 - DNA, 20 bp, synthetic construct
  source 1..20: mol_type = other DNA
aagtaaacatctttgctttt

SEQ ID NO: 2288 - DNA, 20 bp, synthetic construct
  source 1..20: mol_type = other DNA
ggatcaagtaaacatctttg

SEQ ID NO: 2289 - DNA, 20 bp, synthetic construct
  source 1..20: mol_type = other DNA
tctgctaggagggtctatga

SEQ ID NO: 2290 - DNA, 20 bp, synthetic construct
  source 1..20: mol_type = other DNA
tgcattctgctaggagggtc

SEQ ID NO: 2291 - DNA, 20 bp, synthetic construct
  source 1..20: mol_type = other DNA
cccactgcattctgctagga

SEQ ID NO: 2292 - DNA, 20 bp, synthetic construct
  source 1..20: mol_type = other DNA
ttgaacccactgcattctgc

SEQ ID NO: 2293 - DNA, 20 bp, synthetic construct
  source 1..20: mol_type = other DNA
actggttgaacccactgcat

SEQ ID NO: 2294 - DNA, 20 bp, synthetic construct
  source 1..20: mol_type = other DNA
tcaagactggttgaacccac

SEQ ID NO: 2295 - DNA, 20 bp, synthetic construct
  source 1..20: mol_type = other DNA
tgggatcaagactggttgaa

SEQ ID NO: 2296 - DNA, 20 bp, synthetic construct
  source 1..20: mol_type = other DNA
gcagatgggatcaagactgg

SEQ ID NO: 2297 - DNA, 20 bp, synthetic construct
  source 1..20: mol_type = other DNA
aagctgcagatgggatcaag

SEQ ID NO: 2298 - DNA, 20 bp, synthetic construct
  source 1..20: mol_type = other DNA
gtgctaagctgcagatggga

SEQ ID NO: 2299 - DNA, 20 bp, synthetic construct
  source 1..20: mol_type = other DNA
gcatgtgaagggacccaccc

SEQ ID NO: 2300 - DNA, 20 bp, synthetic construct
  source 1..20: mol_type = other DNA
tgaaaagactgaggcccagg

SEQ ID NO: 2301 - DNA, 20 bp, synthetic construct
  source 1..20: mol_type = other DNA
acagatgaaaagactgaggc

SEQ ID NO: 2302 - DNA, 20 bp, synthetic construct
  source 1..20: mol_type = other DNA
ctattacagatgaaaagact

SEQ ID NO: 2303 - DNA, 20 bp, synthetic construct
  source 1..20: mol_type = other DNA
gtcccctattacagatgaaa

SEQ ID NO: 2304 - DNA, 20 bp, synthetic construct
  source 1..20: mol_type = other DNA
tggttgtcccctattacaga

SEQ ID NO: 2305 - DNA, 20 bp, synthetic construct
  source 1..20: mol_type = other DNA
atctctggttgtcccctatt

SEQ ID NO: 2306 - DNA, 20 bp, synthetic construct
  source 1..20: mol_type = other DNA
gctgcatctctggttgtccc

SEQ ID NO: 2307 - DNA, 20 bp, synthetic construct
  source 1..20: mol_type = other DNA
tatgtgctgcatctctggtt

SEQ ID NO: 2308 - DNA, 20 bp, synthetic construct
  source 1..20: mol_type = other DNA
tctcactttcatttattttc

SEQ ID NO: 2309 - DNA, 20 bp, synthetic construct
  source 1..20: mol_type = other DNA
gcttcaggcagcctgaagga

SEQ ID NO: 2310 - DNA, 20 bp, synthetic construct
  source 1..20: mol_type = other DNA
agtgagcttcaggcagcctg

SEQ ID NO: 2311 - DNA, 20 bp, synthetic construct
  source 1..20: mol_type = other DNA
gcttccccaaagggcccagt

SEQ ID NO: 2312 - DNA, 20 bp, synthetic construct
  source 1..20: mol_type = other DNA
cctttgcttccccaaagggc

SEQ ID NO: 2313 - DNA, 20 bp, synthetic construct
  source 1..20: mol_type = other DNA
cctcatctcagtgcccaaag

SEQ ID NO: 2314 - DNA, 20 bp, synthetic construct
  source 1..20: mol_type = other DNA
agcatccccaatccctgctc

SEQ ID NO: 2315 - DNA, 20 bp, synthetic construct
  source 1..20: mol_type = other DNA
ctttgagcatccccaatccc

SEQ ID NO: 2316 - DNA, 20 bp, synthetic construct
  source 1..20: mol_type = other DNA
gtgtactttgagcatcccca

SEQ ID NO: 2317 - DNA, 20 bp, synthetic construct
  source 1..20: mol_type = other DNA
tccaagtgtactttgagcat

SEQ ID NO: 2318 - DNA, 20 bp, synthetic construct
  source 1..20: mol_type = other DNA
agaggttcaacatccaattt

SEQ ID NO: 2319 - DNA, 20 bp, synthetic construct
  source 1..20: mol_type = other DNA
aaggacagaggttcaacatc

SEQ ID NO: 2320 - DNA, 20 bp, synthetic construct
  source 1..20: mol_type = other DNA
aggccaaggacagaggttca

SEQ ID NO: 2321 - DNA, 20 bp, synthetic construct
  source 1..20: mol_type = other DNA
ctgtgaggccaaggacagag

SEQ ID NO: 2322 - DNA, 20 bp, synthetic construct
  source 1..20: mol_type = other DNA
tctgtctgtgaggccaagga

SEQ ID NO: 2323 - DNA, 20 bp, synthetic construct
  source 1..20: mol_type = other DNA
tgctatctgtctgtgaggcc

SEQ ID NO: 2324 - DNA, 20 bp, synthetic construct
  source 1..20: mol_type = other DNA
gtctctcataattgccagtt

SEQ ID NO: 2325 - DNA, 20 bp, synthetic construct
  source 1..20: mol_type = other DNA
gggaagtctctcataattgc

SEQ ID NO: 2326 - DNA, 20 bp, synthetic construct
  source 1..20: mol_type = other DNA
gccttgggaagtctctcata

SEQ ID NO: 2327 - DNA, 20 bp, synthetic construct
  source 1..20: mol_type = other DNA
gctaggccttgggaagtctc

SEQ ID NO: 2328 - DNA, 20 bp, synthetic construct
  source 1..20: mol_type = other DNA
tgaagtatctaaagaggcta

SEQ ID NO: 2329 - DNA, 20 bp, synthetic construct
  source 1..20: mol_type = other DNA
ccacatgaagtatctaaaga

SEQ ID NO: 2330 - DNA, 20 bp, synthetic construct
  source 1..20: mol_type = other DNA
ggagaccacatgaagtatct

SEQ ID NO: 2331 - DNA, 20 bp, synthetic construct
  source 1..20: mol_type = other DNA
attttggagaccacatgaag

SEQ ID NO: 2332 - DNA, 20 bp, synthetic construct
  source 1..20: mol_type = other DNA
gggtcattttggagaccaca

SEQ ID NO: 2333 - DNA, 20 bp, synthetic construct
  source 1..20: mol_type = other DNA
atgggaatggtatcgcactc

SEQ ID NO: 2334 - DNA, 20 bp, synthetic construct
  source 1..20: mol_type = other DNA
acacaatgggaatggtatcg

SEQ ID NO: 2335 - DNA, 20 bp, synthetic construct
  source 1..20: mol_type = other DNA
cccctgtgccctggtttcta

SEQ ID NO: 2336 - DNA, 20 bp, synthetic construct
  source 1..20: mol_type = other DNA
atgctcccctgtgccctggt

SEQ ID NO: 2337 - DNA, 20 bp, synthetic construct
  source 1..20: mol_type = other DNA
tctgcatgctcccctgtgcc

SEQ ID NO: 2338 - DNA, 20 bp, synthetic construct
  source 1..20: mol_type = other DNA
ggctgtctgcatgctcccct

SEQ ID NO: 2339 - DNA, 20 bp, synthetic construct
  source 1..20: mol_type = other DNA
ctatagaatcagacagacct

SEQ ID NO: 2340 - DNA, 20 bp, synthetic construct
  source 1..20: mol_type = other DNA
atcagctatagaatcagaca

SEQ ID NO: 2341 - DNA, 20 bp, synthetic construct
  source 1..20: mol_type = other DNA
caaacctcacctcccacagg

SEQ ID NO: 2342 - DNA, 20 bp, synthetic construct
  source 1..20: mol_type = other DNA
cagtacaaacctcacctccc

SEQ ID NO: 2343 - DNA, 20 bp, synthetic construct
  source 1..20: mol_type = other DNA
tcagtccactgtcacccttc

SEQ ID NO: 2344 - DNA, 20 bp, synthetic construct
  source 1..20: mol_type = other DNA
agatgtcagtccactgtcac

SEQ ID NO: 2345 - DNA, 20 bp, synthetic construct
  source 1..20: mol_type = other DNA
agggaagatgtcagtccact

SEQ ID NO: 2346 - DNA, 20 bp, synthetic construct
  source 1..20: mol_type = other DNA
agcagagggaagatgtcagt

SEQ ID NO: 2347 - DNA, 20 bp, synthetic construct
  source 1..20: mol_type = other DNA
gcctacagcagagggaagat

SEQ ID NO: 2348 - DNA, 20 bp, synthetic construct
  source 1..20: mol_type = other DNA
ccagtgcctacagcagaggg

SEQ ID NO: 2349 - DNA, 20 bp, synthetic construct
  source 1..20: mol_type = other DNA
tggatccagtgcctacagca

SEQ ID NO: 2350 - DNA, 20 bp, synthetic construct
  source 1..20: mol_type = other DNA
ggatgctggatccagtgcct

SEQ ID NO: 2351 - DNA, 20 bp, synthetic construct
  source 1..20: mol_type = other DNA
acccagtacaaggaaggaca

SEQ ID NO: 2352 - DNA, 20 bp, synthetic construct
  source 1..20: mol_type = other DNA
agcttacccagtacaaggaa

SEQ ID NO: 2353 - DNA, 20 bp, synthetic construct
  source 1..20: mol_type = other DNA
ggcccagcttacccagtaca

SEQ ID NO: 2354 - DNA, 20 bp, synthetic construct
  source 1..20: mol_type = other DNA
ctcttattccctcacccctg

SEQ ID NO: 2355 - DNA, 20 bp, synthetic construct
  source 1..20: mol_type = other DNA
cacttgatctgggacccaaa

SEQ ID NO: 2356 - DNA, 20 bp, synthetic construct
  source 1..20: mol_type = other DNA
tagagcacttgatctgggac

SEQ ID NO: 2357 - DNA, 20 bp, synthetic construct
  source 1..20: mol_type = other DNA
actatcacaccacctcccac

SEQ ID NO: 2358 - DNA, 20 bp, synthetic construct
  source 1..20: mol_type = other DNA
tgggaactatcacaccacct

SEQ ID NO: 2359 - DNA, 20 bp, synthetic construct
  source 1..20: mol_type = other DNA
gtaaatgggaactatcacac

SEQ ID NO: 2360 - DNA, 20 bp, synthetic construct
  source 1..20: mol_type = other DNA
catctgtaaatgggaactat

SEQ ID NO: 2361 - DNA, 20 bp, synthetic construct
  source 1..20: mol_type = other DNA
tttcccatctgtaaatggga

SEQ ID NO: 2362 - DNA, 20 bp, synthetic construct
  source 1..20: mol_type = other DNA
tgaggtttcccatctgtaaa

SEQ ID NO: 2363 - DNA, 20 bp, synthetic construct
  source 1..20: mol_type = other DNA
gaccttgggcaagttaccta

SEQ ID NO: 2364 - DNA, 20 bp, synthetic construct
  source 1..20: mol_type = other DNA
tgtgtgaccttgggcaagtt

SEQ ID NO: 2365 - DNA, 20 bp, synthetic construct
  source 1..20: mol_type = other DNA
aaatctgtgtgaccttgggc

SEQ ID NO: 2366 - DNA, 20 bp, synthetic construct
  source 1..20: mol_type = other DNA
gattcaaatctgtgtgacct

SEQ ID NO: 2367 - DNA, 20 bp, synthetic construct
  source 1..20: mol_type = other DNA
acagggattcaaatctgtgt

SEQ ID NO: 2368 - DNA, 20 bp, synthetic construct
  source 1..20: mol_type = other DNA
ggaaaggcacaggctttggg

SEQ ID NO: 2369 - DNA, 20 bp, synthetic construct
  source 1..20: mol_type = other DNA
aatgtctgttggtgggcagg

SEQ ID NO: 2370 - DNA, 20 bp, synthetic construct
  source 1..20: mol_type = other DNA
ggcaaagtaacatacctgct

SEQ ID NO: 2371 - DNA, 20 bp, synthetic construct
  source 1..20: mol_type = other DNA
cttaaggcaaagtaacatac

SEQ ID NO: 2372 - DNA, 20 bp, synthetic construct
  source 1..20: mol_type = other DNA
tgtaaggtcacagagcttgt

SEQ ID NO: 2373 - DNA, 20 bp, synthetic construct
  source 1..20: mol_type = other DNA
ggaaactaacactcagagag

SEQ ID NO: 2374 - DNA, 20 bp, synthetic construct
  source 1..20: mol_type = other DNA
aatgaggaaactaacactca

SEQ ID NO: 2375 - DNA, 20 bp, synthetic construct
  source 1..20: mol_type = other DNA
tttcttatcttcaatcctca

SEQ ID NO: 2376 - DNA, 20 bp, synthetic construct
  source 1..20: mol_type = other DNA
tctcatttcttatcttcaat

SEQ ID NO: 2377 - DNA, 20 bp, synthetic construct
  source 1..20: mol_type = other DNA
ggtgctctcatttcttatct

SEQ ID NO: 2378 - DNA, 20 bp, synthetic construct
  source 1..20: mol_type = other DNA
cccatcatgaccaggccctg

SEQ ID NO: 2379 - DNA, 20 bp, synthetic construct
  source 1..20: mol_type = other DNA
aggcctcgggaagcacctgg

SEQ ID NO: 2380 - DNA, 20 bp, synthetic construct
  source 1..20: mol_type = other DNA
ggagcaggcctcgggaagca

SEQ ID NO: 2381 - DNA, 20 bp, synthetic construct
  source 1..20: mol_type = other DNA
atgtgggctgtgctgagaga

SEQ ID NO: 2382 - DNA, 20 bp, synthetic construct
  source 1..20: mol_type = other DNA
agaaaaagcaaccaaagcac

SEQ ID NO: 2383 - DNA, 20 bp, synthetic construct
  source 1..20: mol_type = other DNA
cctgcagaaaaagcaaccaa

SEQ ID NO: 2384 - DNA, 20 bp, synthetic construct
  source 1..20: mol_type = other DNA
ccagacctgcagaaaaagca

SEQ ID NO: 2385 - DNA, 20 bp, synthetic construct
  source 1..20: mol_type = other DNA
cctaaggagtgagggtatct

SEQ ID NO: 2386 - DNA, 20 bp, synthetic construct
  source 1..20: mol_type = other DNA
ctctgagtgcaaaggctctg

SEQ ID NO: 2387 - DNA, 20 bp, synthetic construct
  source 1..20: mol_type = other DNA
agcagctctgagtgcaaagg

SEQ ID NO: 2388 - DNA, 20 bp, synthetic construct
  source 1..20: mol_type = other DNA
cccagagcagctctgagtgc

SEQ ID NO: 2389 - DNA, 20 bp, synthetic construct
  source 1..20: mol_type = other DNA
ctttccccagagcagctctg

SEQ ID NO: 2390 - DNA, 20 bp, synthetic construct
  source 1..20: mol_type = other DNA
tgaccctgcttagaggacct

SEQ ID NO: 2391 - DNA, 20 bp, synthetic construct
  source 1..20: mol_type = other DNA
attcctgaccctgcttagag

SEQ ID NO: 2392 - DNA, 20 bp, synthetic construct
  source 1..20: mol_type = other DNA
ccagcattcctgaccctgct

SEQ ID NO: 2393 - DNA, 20 bp, synthetic construct
  source 1..20: mol_type = other DNA
gaaacccagcattcctgacc

SEQ ID NO: 2394 - DNA, 20 bp, synthetic construct
  source 1..20: mol_type = other DNA
ggactgaaacccagcattcc

SEQ ID NO: 2395 - DNA, 20 bp, synthetic construct
  source 1..20: mol_type = other DNA
agccaggactgaaacccagc

SEQ ID NO: 2396 - DNA, 20 bp, synthetic construct
  source 1..20: mol_type = other DNA
ggcagagccaggactgaaac

SEQ ID NO: 2397 - DNA, 20 bp, synthetic construct
  source 1..20: mol_type = other DNA
taggcggcagagccaggact

SEQ ID NO: 2398 - DNA, 20 bp, synthetic construct
  source 1..20: mol_type = other DNA
ggcagtaggcggcagagcca

SEQ ID NO: 2399 - DNA, 20 bp, synthetic construct
  source 1..20: mol_type = other DNA
accagagacaggcactgact

SEQ ID NO: 2400 - DNA, 20 bp, synthetic construct
  source 1..20: mol_type = other DNA
tggacagccagggagactgg

SEQ ID NO: 2401 - DNA, 20 bp, synthetic construct
  source 1..20: mol_type = other DNA
ctaattggacagccagggag

SEQ ID NO: 2402 - DNA, 20 bp, synthetic construct
  source 1..20: mol_type = other DNA
atagcctaattggacagcca

SEQ ID NO: 2403 - DNA, 20 bp, synthetic construct
  source 1..20: mol_type = other DNA
ccagtatagcctaattggac

SEQ ID NO: 2404 - DNA, 20 bp, synthetic construct
  source 1..20: mol_type = other DNA
ggtcatccagtatagcctaa

SEQ ID NO: 2405 - DNA, 20 bp, synthetic construct
  source 1..20: mol_type = other DNA
gacttgcccagcaacccatc

SEQ ID NO: 2406 - DNA, 20 bp, synthetic construct
  source 1..20: mol_type = other DNA
ctccagacttgcccagcaac

SEQ ID NO: 2407 - DNA, 20 bp, synthetic construct
  source 1..20: mol_type = other DNA
cccacctccagacttgccca

SEQ ID NO: 2408 - DNA, 20 bp, synthetic construct
  source 1..20: mol_type = other DNA
actttcccacctccagactt

SEQ ID NO: 2409 - DNA, 20 bp, synthetic construct
  source 1..20: mol_type = other DNA
ataggactttcccacctcca

SEQ ID NO: 2410 - DNA, 20 bp, synthetic construct
  source 1..20: mol_type = other DNA
ccttcataggactttcccac

SEQ ID NO: 2411 - DNA, 20 bp, synthetic construct
  source 1..20: mol_type = other DNA
tcctaccttcataggacttt

SEQ ID NO: 2412 - DNA, 20 bp, synthetic construct
  source 1..20: mol_type = other DNA
aaaaatcctaccttcatagg

SEQ ID NO: 2413 - DNA, 20 bp, synthetic construct
  source 1..20: mol_type = other DNA
tgcctcataattgctccttc

SEQ ID NO: 2414 - DNA, 20 bp, synthetic construct
  source 1..20: mol_type = other DNA
aggtctgcctcataattgct

SEQ ID NO: 2415 - DNA, 20 bp, synthetic construct
  source 1..20: mol_type = other DNA
tccagaggtctgcctcataa

SEQ ID NO: 2416 - DNA, 20 bp, synthetic construct
  source 1..20: mol_type = other DNA
ataaagaggctgggccatag

SEQ ID NO: 2417 - DNA, 20 bp, synthetic construct
  source 1..20: mol_type = other DNA
caggatgtgaactcacaaaa

SEQ ID NO: 2418 - DNA, 20 bp, synthetic construct
  source 1..20: mol_type = other DNA
gtagcatctaataacaccac

SEQ ID NO: 2419 - DNA, 20 bp, synthetic construct
  source 1..20: mol_type = other DNA
gttcagtagcatctaataac

SEQ ID NO: 2420 - DNA, 20 bp, synthetic construct
  source 1..20: mol_type = other DNA
tgggtgttcagtagcatcta

SEQ ID NO: 2421 - DNA, 20 bp, synthetic construct
  source 1..20: mol_type = other DNA
tatgtgaccccaggcaagct

SEQ ID NO: 2422 - DNA, 20 bp, synthetic construct
  source 1..20: mol_type = other DNA
ctcactatgtgaccccaggc

SEQ ID NO: 2423 - DNA, 20 bp, synthetic construct
  source 1..20: mol_type = other DNA
ttctactcactatgtgaccc

SEQ ID NO: 2424 - DNA, 20 bp, synthetic construct
  source 1..20: mol_type = other DNA
tttggttctactcactatgt

SEQ ID NO: 2425 - DNA, 20 bp, synthetic construct
  source 1..20: mol_type = other DNA
cagactttggttctactcac

SEQ ID NO: 2426 - DNA, 20 bp, synthetic construct
  source 1..20: mol_type = other DNA
aggttcagactttggttcta

SEQ ID NO: 2427 - DNA, 20 bp, synthetic construct
  source 1..20: mol_type = other DNA
aacctaggttcagactttgg

SEQ ID NO: 2428 - DNA, 20 bp, synthetic construct
  source 1..20: mol_type = other DNA
agtcaaacctaggttcagac

SEQ ID NO: 2429 - DNA, 20 bp, synthetic construct
  source 1..20: mol_type = other DNA
agaagagtcaaacctaggtt

SEQ ID NO: 2430 - DNA, 20 bp, synthetic construct
  source 1..20: mol_type = other DNA
ttagcagaagagtcaaacct

SEQ ID NO: 2431 - DNA, 20 bp, synthetic construct
  source 1..20: mol_type = other DNA
ttagtttagcagaagagtca

SEQ ID NO: 2432 - DNA, 20 bp, synthetic construct
  source 1..20: mol_type = other DNA
gtgtgatgcatcagagggaa

SEQ ID NO: 2433 - DNA, 20 bp, synthetic construct
  source 1..20: mol_type = other DNA
ccctggtgtgatgcatcaga

SEQ ID NO: 2434 - DNA, 20 bp, synthetic construct
  source 1..20: mol_type = other DNA
cctttccctggtgtgatgca

SEQ ID NO: 2435 - DNA, 20 bp, synthetic construct
  source 1..20: mol_type = other DNA
aaatgctaggcctcaagatg

SEQ ID NO: 2436 - DNA, 20 bp, synthetic construct
  source 1..20: mol_type = other DNA
gaaggaaatgctaggcctca

SEQ ID NO: 2437 - DNA, 20 bp, synthetic construct
  source 1..20: mol_type = other DNA
ggaaggaaggaaatgctagg

SEQ ID NO: 2438 - DNA, 20 bp, synthetic construct
  source 1..20: mol_type = other DNA
taggaggaaggaaggaaatg

SEQ ID NO: 2439 - DNA, 20 bp, synthetic construct
  source 1..20: mol_type = other DNA
acttttaggaggaaggaagg

SEQ ID NO: 2440 - DNA, 20 bp, synthetic construct
  source 1..20: mol_type = other DNA
ctttgacttttaggaggaag

SEQ ID NO: 2441 - DNA, 20 bp, synthetic construct
  source 1..20: mol_type = other DNA
aactgctttgacttttagga

SEQ ID NO: 2442 - DNA, 20 bp, synthetic construct
  source 1..20: mol_type = other DNA
ttaacaactgctttgacttt

SEQ ID NO: 2443 - DNA, 20 bp, synthetic construct
  source 1..20: mol_type = other DNA
gaaagttaacaactgctttg

SEQ ID NO: 2444 - DNA, 20 bp, synthetic construct
  source 1..20: mol_type = other DNA
taccatctgctctgtgaaag

SEQ ID NO: 2445 - DNA, 20 bp, synthetic construct
  source 1..20: mol_type = other DNA
cttcataccatctgctctgt

SEQ ID NO: 2446 - DNA, 20 bp, synthetic construct
  source 1..20: mol_type = other DNA
caagcacctactgtgtgccc

SEQ ID NO: 2447 - DNA, 20 bp, synthetic construct
  source 1..20: mol_type = other DNA
ttcaccaagcacctactgtg

SEQ ID NO: 2448 - DNA, 20 bp, synthetic construct
  source 1..20: mol_type = other DNA
acatcttcaccaagcaccta

SEQ ID NO: 2449 - DNA, 20 bp, synthetic construct
  source 1..20: mol_type = other DNA
ccactacatgccctttgctc

SEQ ID NO: 2450 - DNA, 20 bp, synthetic construct
  source 1..20: mol_type = other DNA
ctgaagaagtgggccacctc

SEQ ID NO: 2451 - DNA, 20 bp, synthetic construct
  source 1..20: mol_type = other DNA
acccataccccattccttcc

SEQ ID NO: 2452 - DNA, 20 bp, synthetic construct
  source 1..20: mol_type = other DNA
tcctcacccataccccattc

SEQ ID NO: 2453 - DNA, 20 bp, synthetic construct
  source 1..20: mol_type = other DNA
agcctggtgactgcaggaga

SEQ ID NO: 2454 - DNA, 20 bp, synthetic construct
  source 1..20: mol_type = other DNA
caggaagcctggtgactgca

SEQ ID NO: 2455 - DNA, 20 bp, synthetic construct
  source 1..20: mol_type = other DNA
tccagcagctgatgggcagt

SEQ ID NO: 2456 - DNA, 20 bp, synthetic construct
  source 1..20: mol_type = other DNA
tggactccagcagctgatgg

SEQ ID NO: 2457 - DNA, 20 bp, synthetic construct
  source 1..20: mol_type = other DNA
cttggtgcccctaggatgac

SEQ ID NO: 2458 - DNA, 20 bp, synthetic construct
  source 1..20: mol_type = other DNA
attggcttggtgcccctagg

SEQ ID NO: 2459 - DNA, 20 bp, synthetic construct
  source 1..20: mol_type = other DNA
acttaattggcttggtgccc

SEQ ID NO: 2460 - DNA, 20 bp, synthetic construct
  source 1..20: mol_type = other DNA
cactgagggctgtaattatg

SEQ ID NO: 2461 - DNA, 20 bp, synthetic construct
  source 1..20: mol_type = other DNA
aaggacactgagggctgtaa

SEQ ID NO: 2462 - DNA, 20 bp, synthetic construct
  source 1..20: mol_type = other DNA
gcctgaaggacactgagggc

SEQ ID NO: 2463 - DNA, 20 bp, synthetic construct
  source 1..20: mol_type = other DNA
aggcagcctgaaggacactg

SEQ ID NO: 2464 - DNA, 20 bp, synthetic construct
  source 1..20: mol_type = other DNA
tgttcctgactcctgggtgg

SEQ ID NO: 2465 - DNA, 20 bp, synthetic construct
  source 1..20: mol_type = other DNA
ctgactgttcctgactcctg

SEQ ID NO: 2466 - DNA, 20 bp, synthetic construct
  source 1..20: mol_type = other DNA
tgctgcaatcagatgccacc

SEQ ID NO: 2467 - DNA, 20 bp, synthetic construct
  source 1..20: mol_type = other DNA
gccgatgctgcaatcagatg

SEQ ID NO: 2468 - DNA, 20 bp, synthetic construct
  source 1..20: mol_type = other DNA
gggatgccgatgctgcaatc

SEQ ID NO: 2469 - DNA, 20 bp, synthetic construct
  source 1..20: mol_type = other DNA
gtccagcagaagctggtggg

SEQ ID NO: 2470 - DNA, 20 bp, synthetic construct
  source 1..20: mol_type = other DNA
gaggagtccagcagaagctg

SEQ ID NO: 2471 - DNA, 20 bp, synthetic construct
  source 1..20: mol_type = other DNA
gctgggaggagtccagcaga

SEQ ID NO: 2472 - DNA, 20 bp, synthetic construct
  source 1..20: mol_type = other DNA
ctgtggctgggaggagtcca

SEQ ID NO: 2473 - DNA, 20 bp, synthetic construct
  source 1..20: mol_type = other DNA
cccagctgtggctgggagga

SEQ ID NO: 2474 - DNA, 20 bp, synthetic construct
  source 1..20: mol_type = other DNA
tctgccccagctgtggctgg

SEQ ID NO: 2475 - DNA, 20 bp, synthetic construct
  source 1..20: mol_type = other DNA
cttcctctgccccagctgtg

SEQ ID NO: 2476 - DNA, 20 bp, synthetic construct
  source 1..20: mol_type = other DNA
cagtacttcctctgccccag

SEQ ID NO: 2477 - DNA, 20 bp, synthetic construct
  source 1..20: mol_type = other DNA
gctgtcagtacttcctctgc

SEQ ID NO: 2478 - DNA, 20 bp, synthetic construct
  source 1..20: mol_type = other DNA
acctggctgtcagtacttcc

SEQ ID NO: 2479 - DNA, 20 bp, synthetic construct
  source 1..20: mol_type = other DNA
ttgccacctggctgtcagta

SEQ ID NO: 2480 - DNA, 20 bp, synthetic construct
  source 1..20: mol_type = other DNA
agtccttgccacctggctgt

SEQ ID NO: 2481 - DNA, 20 bp, synthetic construct
  source 1..20: mol_type = other DNA
ctgccagtccttgccacctg

SEQ ID NO: 2482 - DNA, 20 bp, synthetic construct
  source 1..20: mol_type = other DNA
aaacactgccagtccttgcc

SEQ ID NO: 2483 - DNA, 20 bp, synthetic construct
  source 1..20: mol_type = other DNA
ggaagtgagggttcagttgg

SEQ ID NO: 2484 - DNA, 20 bp, synthetic construct
  source 1..20: mol_type = other DNA
ctctctgggcttcagtttcc

SEQ ID NO: 2485 - DNA, 20 bp, synthetic construct
  source 1..20: mol_type = other DNA
ctcacctctctgggcttcag

SEQ ID NO: 2486 - DNA, 20 bp, synthetic construct
  source 1..20: mol_type = other DNA
gtctcctcacctctctgggc

SEQ ID NO: 2487 - DNA, 20 bp, synthetic construct
  source 1..20: mol_type = other DNA
gctaagtctcctcacctctc

SEQ ID NO: 2488 - DNA, 20 bp, synthetic construct
  source 1..20: mol_type = other DNA
atctgttttccttcagaggg

SEQ ID NO: 2489 - DNA, 20 bp, synthetic construct
  source 1..20: mol_type = other DNA
ttccttctctctgctcccca

SEQ ID NO: 2490 - DNA, 20 bp, synthetic construct
  source 1..20: mol_type = other DNA
ccaagttccttctctctgct

SEQ ID NO: 2491 - DNA, 20 bp, synthetic construct
  source 1..20: mol_type = other DNA
tgtccccaagttccttctct

SEQ ID NO: 2492 - DNA, 20 bp, synthetic construct
  source 1..20: mol_type = other DNA
ggtcaaggtcactcagccag

SEQ ID NO: 2493 - DNA, 20 bp, synthetic construct
  source 1..20: mol_type = other DNA
ccctattttgatggtgatac

SEQ ID NO: 2494 - DNA, 20 bp, synthetic construct
  source 1..20: mol_type = other DNA
tggactcctgtgagtttggc

SEQ ID NO: 2495 - DNA, 20 bp, synthetic construct
  source 1..20: mol_type = other DNA
gcacttggactcctgtgagt

SEQ ID NO: 2496 - DNA, 20 bp, synthetic construct
  source 1..20: mol_type = other DNA
cacaggcacttggactcctg

SEQ ID NO: 2497 - DNA, 20 bp, synthetic construct
  source 1..20: mol_type = other DNA
ccttgcacaggcacttggac

SEQ ID NO: 2498 - DNA, 20 bp, synthetic construct
  source 1..20: mol_type = other DNA
catgcccttgcacaggcact

SEQ ID NO: 2499 - DNA, 20 bp, synthetic construct
  source 1..20: mol_type = other DNA
ccctccatgcccttgcacag

SEQ ID NO: 2500 - DNA, 20 bp, synthetic construct
  source 1..20: mol_type = other DNA
aggcccataaagctttggga

SEQ ID NO: 2501 - DNA, 20 bp, synthetic construct
  source 1..20: mol_type = other DNA
acaagaggcccataaagctt

SEQ ID NO: 2502 - DNA, 20 bp, synthetic construct
  source 1..20: mol_type = other DNA
gatgcacaagaggcccataa

SEQ ID NO: 2503 - DNA, 20 bp, synthetic construct
  source 1..20: mol_type = other DNA
ggtatgatgcacaagaggcc

SEQ ID NO: 2504 - DNA, 20 bp, synthetic construct
  source 1..20: mol_type = other DNA
ctggccactcttcaggcccc

SEQ ID NO: 2505 - DNA, 20 bp, synthetic construct
  source 1..20: mol_type = other DNA
gtgctctggccactcttcag

SEQ ID NO: 2506 - DNA, 20 bp, synthetic construct
  source 1..20: mol_type = other DNA
gatccatatctggatcccca

SEQ ID NO: 2507 - DNA, 20 bp, synthetic construct
  source 1..20: mol_type = other DNA
ggtctgatccatatctggat

SEQ ID NO: 2508 - DNA, 20 bp, synthetic construct
  source 1..20: mol_type = other DNA
gctgattacaagctgattct

SEQ ID NO: 2509 - DNA, 20 bp, synthetic construct
  source 1..20: mol_type = other DNA
taactgctgattacaagctg

SEQ ID NO: 2510 - DNA, 20 bp, synthetic construct
  source 1..20: mol_type = other DNA
acaatggagaaacaaaagag

SEQ ID NO: 2511 - DNA, 20 bp, synthetic construct
  source 1..20: mol_type = other DNA
tttgaagataaagtcagacc

SEQ ID NO: 2512 - DNA, 20 bp, synthetic construct
  source 1..20: mol_type = other DNA
gtctatgcaggcctggaatt

SEQ ID NO: 2513 - DNA, 20 bp, synthetic construct
  source 1..20: mol_type = other DNA
ctaaggtctatgcaggcctg

SEQ ID NO: 2514 - DNA, 20 bp, synthetic construct
  source 1..20: mol_type = other DNA
aaacactaaggtctatgcag

SEQ ID NO: 2515 - DNA, 20 bp, synthetic construct
  source 1..20: mol_type = other DNA
atgataaacactaaggtcta

SEQ ID NO: 2516 - DNA, 20 bp, synthetic construct
  source 1..20: mol_type = other DNA
ctgggatgataaacactaag

SEQ ID NO: 2517 - DNA, 20 bp, synthetic construct
  source 1..20: mol_type = other DNA
cttctctgggatgataaaca

SEQ ID NO: 2518 - DNA, 20 bp, synthetic construct
  source 1..20: mol_type = other DNA
ctttccttctctgggatgat

SEQ ID NO: 2519 - DNA, 20 bp, synthetic construct
  source 1..20: mol_type = other DNA
aagcctttggaaagagaagg

SEQ ID NO: 2520 - DNA, 20 bp, synthetic construct
  source 1..20: mol_type = other DNA
ccaggaagcctttggaaaga

SEQ ID NO: 2521 - DNA, 20 bp, synthetic construct
  source 1..20: mol_type = other DNA
gtcttccaggaagcctttgg

SEQ ID NO: 2522 - DNA, 20 bp, synthetic construct
  source 1..20: mol_type = other DNA
cagcagtcttccaggaagcc

SEQ ID NO: 2523 - DNA, 20 bp, synthetic construct
  source 1..20: mol_type = other DNA
taaggcagcagtcttccagg

SEQ ID NO: 2524 - DNA, 20 bp, synthetic construct
  source 1..20: mol_type = other DNA
ggtgataaggcagcagtctt

SEQ ID NO: 2525 - DNA, 20 bp, synthetic construct
  source 1..20: mol_type = other DNA
gagatggtgataaggcagca

SEQ ID NO: 2526 - DNA, 20 bp, synthetic construct
  source 1..20: mol_type = other DNA
aacccagagatggtgataag

SEQ ID NO: 2527 - DNA, 20 bp, synthetic construct
  source 1..20: mol_type = other DNA
ttcaaaacccagagatggtg

SEQ ID NO: 2528 - DNA, 20 bp, synthetic construct
  source 1..20: mol_type = other DNA
catccttcaaaacccagaga

SEQ ID NO: 2529 - DNA, 20 bp, synthetic construct
  source 1..20: mol_type = other DNA
ctgataatgagataaagcaa

SEQ ID NO: 2530 - DNA, 20 bp, synthetic construct
  source 1..20: mol_type = other DNA
cagaggcccttccctgcttt

SEQ ID NO: 2531 - DNA, 20 bp, synthetic construct
  source 1..20: mol_type = other DNA
tgggagcccccagtccacct

SEQ ID NO: 2532 - DNA, 20 bp, synthetic construct
  source 1..20: mol_type = other DNA
gccagtgggagcccccagtc

SEQ ID NO: 2533 - DNA, 20 bp, synthetic construct
  source 1..20: mol_type = other DNA
tggcctgggagctggcctgg

SEQ ID NO: 2534 - DNA, 20 bp, synthetic construct
  source 1..20: mol_type = other DNA
ctctcaggcaatcccaacct

SEQ ID NO: 2535 - DNA, 20 bp, synthetic construct
  source 1..20: mol_type = other DNA
aggccctctcaggcaatccc

SEQ ID NO: 2536 - DNA, 20 bp, synthetic construct
  source 1..20: mol_type = other DNA
ggcccaggccctctcaggca

SEQ ID NO: 2537 - DNA, 20 bp, synthetic construct
  source 1..20: mol_type = other DNA
tctcaggcccaggccctctc

SEQ ID NO: 2538 - DNA, 20 bp, synthetic construct
  source 1..20: mol_type = other DNA
ctcctggagagggaagctgg

SEQ ID NO: 2539 - DNA, 20 bp, synthetic construct
  source 1..20: mol_type = other DNA
ggaggctcctggagagggaa

SEQ ID NO: 2540 - DNA, 20 bp, synthetic construct
  source 1..20: mol_type = other DNA
agttgggaggctcctggaga

SEQ ID NO: 2541 - DNA, 20 bp, synthetic construct
  source 1..20: mol_type = other DNA
gctggaacaaagccttgcag

SEQ ID NO: 2542 - DNA, 20 bp, synthetic construct
  source 1..20: mol_type = other DNA
aagaagaggtcgcagagtga

SEQ ID NO: 2543 - DNA, 20 bp, synthetic construct
  source 1..20: mol_type = other DNA
gctactggcattgctcctcc

SEQ ID NO: 2544 - DNA, 20 bp, synthetic construct
  source 1..20: mol_type = other DNA
acatgtggcatttgttaggt

SEQ ID NO: 2545 - DNA, 20 bp, synthetic construct
  source 1..20: mol_type = other DNA
ggaacattaaattttaaaac

SEQ ID NO: 2546 - DNA, 20 bp, synthetic construct
  source 1..20: mol_type = other DNA
taggatgagggtgataatcc

SEQ ID NO: 2547 - DNA, 20 bp, synthetic construct
  source 1..20: mol_type = other DNA
cctaactctagctttggttt

SEQ ID NO: 2548 - DNA, 20 bp, synthetic construct
  source 1..20: mol_type = other DNA
agtcacctaactctagcttt

SEQ ID NO: 2549 - DNA, 20 bp, synthetic construct
  source 1..20: mol_type = other DNA
gccctgggccagctctgccc

SEQ ID NO: 2550 - DNA, 20 bp, synthetic construct
  source 1..20: mol_type = other DNA
tctgagaaagagggccctgg

SEQ ID NO: 2551 - DNA, 20 bp, synthetic construct
  source 1..20: mol_type = other DNA
ctaaatctgagaaagagggc

SEQ ID NO: 2552 - DNA, 20 bp, synthetic construct
  source 1..20: mol_type = other DNA
ctgagggcagcagtgtctga

SEQ ID NO: 2553 - DNA, 20 bp, synthetic construct
  source 1..20: mol_type = other DNA
catgcctgagggcagcagtg

SEQ ID NO: 2554 - DNA, 20 bp, synthetic construct
  source 1..20: mol_type = other DNA
tctcacatgcctgagggcag

SEQ ID NO: 2555 - DNA, 20 bp, synthetic construct
  source 1..20: mol_type = other DNA
caggaaggccacacctcggg

SEQ ID NO: 2556 - DNA, 20 bp, synthetic construct
  source 1..20: mol_type = other DNA
gtgaccaggaaggccacacc

SEQ ID NO: 2557 - DNA, 20 bp, synthetic construct
  source 1..20: mol_type = other DNA
tcaaagtgaccaggaaggcc

SEQ ID NO: 2558 - DNA, 20 bp, synthetic construct
  source 1..20: mol_type = other DNA
tgatatcaaagtgaccagga

SEQ ID NO: 2559 - DNA, 20 bp, synthetic construct
  source 1..20: mol_type = other DNA
atatctgatatcaaagtgac

SEQ ID NO: 2560 - DNA, 20 bp, synthetic construct
  source 1..20: mol_type = other DNA
gcccaatatctgatatcaaa

SEQ ID NO: 2561 - DNA, 20 bp, synthetic construct
  source 1..20: mol_type = other DNA
gacccagggcccagcccagg

SEQ ID NO: 2562 - DNA, 20 bp, synthetic construct
  source 1..20: mol_type = other DNA
tctcagacccagggcccagc

SEQ ID NO: 2563 - DNA, 20 bp, synthetic construct
  source 1..20: mol_type = other DNA
tgagactggattccaccccc

SEQ ID NO: 2564 - DNA, 20 bp, synthetic construct
  source 1..20: mol_type = other DNA
tacaatgctacgctgttgag

SEQ ID NO: 2565 - DNA, 20 bp, synthetic construct
  source 1..20: mol_type = other DNA
atctctacaatgctacgctg

SEQ ID NO: 2566 - DNA, 20 bp, synthetic construct
  source 1..20: mol_type = other DNA
tcatcatctctacaatgcta

SEQ ID NO: 2567 - DNA, 20 bp, synthetic construct
  source 1..20: mol_type = other DNA
gtccctcatcatctctacaa

SEQ ID NO: 2568 - DNA, 20 bp, synthetic construct
  source 1..20: mol_type = other DNA
tcccagtccctcatcatctc

SEQ ID NO: 2569 - DNA, 20 bp, synthetic construct
  source 1..20: mol_type = other DNA
caggctcccagtccctcatc

SEQ ID NO: 2570 - DNA, 20 bp, synthetic construct
  source 1..20: mol_type = other DNA
gtattcaggctcccagtccc

SEQ ID NO: 2571 - DNA, 20 bp, synthetic construct
  source 1..20: mol_type = other DNA
tgcttgaggtcagggtgtgg

SEQ ID NO: 2572 - DNA, 20 bp, synthetic construct
  source 1..20: mol_type = other DNA
tcacttgcttgaggtcaggg

SEQ ID NO: 2573 - DNA, 20 bp, synthetic construct
  source 1..20: mol_type = other DNA
caaaatcacttgcttgaggt

SEQ ID NO: 2574 - DNA, 20 bp, synthetic construct
  source 1..20: mol_type = other DNA
agaggcaaaatcacttgctt

SEQ ID NO: 2575 - DNA, 20 bp, synthetic construct
  source 1..20: mol_type = other DNA
ccacagcactctctgggaag

SEQ ID NO: 2576 - DNA, 20 bp, synthetic construct
  source 1..20: mol_type = other DNA
ccgtcccacagcactctctg

SEQ ID NO: 2577 - DNA, 20 bp, synthetic construct
  source 1..20: mol_type = other DNA
cttcaccgtcccacagcact

SEQ ID NO: 2578 - DNA, 20 bp, synthetic construct
  source 1..20: mol_type = other DNA
ggaaagcaatccccttctcc

SEQ ID NO: 2579 - DNA, 20 bp, synthetic construct
  source 1..20: mol_type = other DNA
cacccggaaagcaatcccct

SEQ ID NO: 2580 - DNA, 20 bp, synthetic construct
  source 1..20: mol_type = other DNA
tttaccacccggaaagcaat

SEQ ID NO: 2581 - DNA, 20 bp, synthetic construct
  source 1..20: mol_type = other DNA
gctcttttaccacccggaaa

SEQ ID NO: 2582 - DNA, 20 bp, synthetic construct
  source 1..20: mol_type = other DNA
gagcagctcttttaccaccc

SEQ ID NO: 2583 - DNA, 20 bp, synthetic construct
  source 1..20: mol_type = other DNA
gcagcacttgctttacacac

SEQ ID NO: 2584 - DNA, 20 bp, synthetic construct
  source 1..20: mol_type = other DNA
cccaggcagcacttgcttta

SEQ ID NO: 2585 - DNA, 20 bp, synthetic construct
  source 1..20: mol_type = other DNA
ctgctcccaggcagcacttg

SEQ ID NO: 2586 - DNA, 20 bp, synthetic construct
  source 1..20: mol_type = other DNA
acaaccctgctacctacaga

SEQ ID NO: 2587 - DNA, 20 bp, synthetic construct
  source 1..20: mol_type = other DNA
ggaacacaaccctgctacct

SEQ ID NO: 2588 - DNA, 20 bp, synthetic construct
  source 1..20: mol_type = other DNA
gtacaagtttctccacctat

SEQ ID NO: 2589 - DNA, 20 bp, synthetic construct
  source 1..20: mol_type = other DNA
cctaggtacaagtttctcca

SEQ ID NO: 2590 - DNA, 20 bp, synthetic construct
  source 1..20: mol_type = other DNA
ggactgaccccagagatggg

SEQ ID NO: 2591 - DNA, 20 bp, synthetic construct
  source 1..20: mol_type = other DNA
actgaggactgaccccagag

SEQ ID NO: 2592 - DNA, 20 bp, synthetic construct
  source 1..20: mol_type = other DNA
ccatcactgaggactgaccc

SEQ ID NO: 2593 - DNA, 20 bp, synthetic construct
  source 1..20: mol_type = other DNA
cagccccatcactgaggact

SEQ ID NO: 2594 - DNA, 20 bp, synthetic construct
  source 1..20: mol_type = other DNA
ggatgcccaagttagactgg

SEQ ID NO: 2595 - DNA, 20 bp, synthetic construct
  source 1..20: mol_type = other DNA
ccagagcagcctcagaggca

SEQ ID NO: 2596 - DNA, 20 bp, synthetic construct
  source 1..20: mol_type = other DNA
caaatccagagcagcctcag

SEQ ID NO: 2597 - DNA, 20 bp, synthetic construct
  source 1..20: mol_type = other DNA
ataagcaaatccagagcagc

SEQ ID NO: 2598 - DNA, 20 bp, synthetic construct
  source 1..20: mol_type = other DNA
aatccataagcaaatccaga

SEQ ID NO: 2599 - DNA, 20 bp, synthetic construct
  source 1..20: mol_type = other DNA
gagcaaatccataagcaaat

SEQ ID NO: 2600 - DNA, 20 bp, synthetic construct
  source 1..20: mol_type = other DNA
tagctgagcaaatccataag

SEQ ID NO: 2601 - DNA, 20 bp, synthetic construct
  source 1..20: mol_type = other DNA
ctgcatagctgagcaaatcc

SEQ ID NO: 2602 - DNA, 20 bp, synthetic construct
  source 1..20: mol_type = other DNA
gtttactgcatagctgagca

SEQ ID NO: 2603 - DNA, 20 bp, synthetic construct
  source 1..20: mol_type = other DNA
tagaggtttactgcatagct

SEQ ID NO: 2604 - DNA, 20 bp, synthetic construct
  source 1..20: mol_type = other DNA
gattcatctgtggtaagagg

SEQ ID NO: 2605 - DNA, 20 bp, synthetic construct
  source 1..20: mol_type = other DNA
tacctgattcatctgtggta

SEQ ID NO: 2606 - DNA, 20 bp, synthetic construct
  source 1..20: mol_type = other DNA
cttggtacctgattcatctg

SEQ ID NO: 2607 - DNA, 20 bp, synthetic construct
  source 1..20: mol_type = other DNA
ccaggacttggtacctgatt

SEQ ID NO: 2608 - DNA, 20 bp, synthetic construct
  source 1..20: mol_type = other DNA
gggtgccaggacttggtacc

SEQ ID NO: 2609 - DNA, 20 bp, synthetic construct
  source 1..20: mol_type = other DNA
gccatcccactgccagtgac

SEQ ID NO: 2610 - DNA, 20 bp, synthetic construct
  source 1..20: mol_type = other DNA
acagcaccaatgtcacttta

SEQ ID NO: 2611 - DNA, 20 bp, synthetic construct
  source 1..20: mol_type = other DNA
tctgcacactcccacagcac

SEQ ID NO: 2612 - DNA, 20 bp, synthetic construct
  source 1..20: mol_type = other DNA
ctctctctgcacactcccac

SEQ ID NO: 2613 - DNA, 20 bp, synthetic construct
  source 1..20: mol_type = other DNA
ctgcactctctctgcacact

SEQ ID NO: 2614 - DNA, 20 bp, synthetic construct
  source 1..20: mol_type = other DNA
gtcctggcctctaccctgaa

SEQ ID NO: 2615 - DNA, 20 bp, synthetic construct
  source 1..20: mol_type = other DNA
gaaggactgggatgctaggt

SEQ ID NO: 2616 - DNA, 20 bp, synthetic construct
  source 1..20: mol_type = other DNA
ggcatgaaggactgggatgc

SEQ ID NO: 2617 - DNA, 20 bp, synthetic construct
  source 1..20: mol_type = other DNA
agggaggcatgaaggactgg

SEQ ID NO: 2618 - DNA, 20 bp, synthetic construct
  source 1..20: mol_type = other DNA
gaaacagggaggcatgaagg

SEQ ID NO: 2619 - DNA, 20 bp, synthetic construct
  source 1..20: mol_type = other DNA
gtagagaaacagggaggcat

SEQ ID NO: 2620 - DNA, 20 bp, synthetic construct
  source 1..20: mol_type = other DNA
gaaaagtagagaaacaggga

SEQ ID NO: 2621 - DNA, 20 bp, synthetic construct
  source 1..20: mol_type = other DNA
agttggaaaagtagagaaac

SEQ ID NO: 2622 - DNA, 20 bp, synthetic construct
  source 1..20: mol_type = other DNA
gagtctagttggaaaagtag

SEQ ID NO: 2623 - DNA, 20 bp, synthetic construct
  source 1..20: mol_type = other DNA
actgtgagtctagttggaaa

SEQ ID NO: 2624 - DNA, 20 bp, synthetic construct
  source 1..20: mol_type = other DNA
cagagactgtgagtctagtt

SEQ ID NO: 2625 - DNA, 20 bp, synthetic construct
  source 1..20: mol_type = other DNA
cagcacagagactgtgagtc

SEQ ID NO: 2626 - DNA, 20 bp, synthetic construct
  source 1..20: mol_type = other DNA
gactgcagcacagagactgt

SEQ ID NO: 2627 - DNA, 20 bp, synthetic construct
  source 1..20: mol_type = other DNA
agtcagactgcagcacagag

SEQ ID NO: 2628 - DNA, 20 bp, synthetic construct
  source 1..20: mol_type = other DNA
agtttagtcagactgcagca

SEQ ID NO: 2629 - DNA, 20 bp, synthetic construct
  source 1..20: mol_type = other DNA
gatgccttccaggaggaagg

SEQ ID NO: 2630 - DNA, 20 bp, synthetic construct
  source 1..20: mol_type = other DNA
ttagggatgccttccaggag

SEQ ID NO: 2631 - DNA, 20 bp, synthetic construct
  source 1..20: mol_type = other DNA
tgttcttagggatgccttcc

SEQ ID NO: 2632 - DNA, 20 bp, synthetic construct
  source 1..20: mol_type = other DNA
aggctgagttctgctcctgg

SEQ ID NO: 2633 - DNA, 20 bp, synthetic construct
  source 1..20: mol_type = other DNA
gctagaggctgagttctgct

SEQ ID NO: 2634 - DNA, 20 bp, synthetic construct
  source 1..20: mol_type = other DNA
catctgctagaggctgagtt

SEQ ID NO: 2635 - DNA, 20 bp, synthetic construct
  source 1..20: mol_type = other DNA
ttgggcatctgctagaggct

SEQ ID NO: 2636 - DNA, 20 bp, synthetic construct
  source 1..20: mol_type = other DNA
gcttcttgggcatctgctag

SEQ ID NO: 2637 - DNA, 20 bp, synthetic construct
  source 1..20: mol_type = other DNA
cctctgcttcttgggcatct

SEQ ID NO: 2638 - DNA, 20 bp, synthetic construct
  source 1..20: mol_type = other DNA
tttctaagtaccctttacac

SEQ ID NO: 2639 - DNA, 20 bp, synthetic construct
  source 1..20: mol_type = other DNA
agtgctttctaagtaccctt

SEQ ID NO: 2640 - DNA, 20 bp, synthetic construct
  source 1..20: mol_type = other DNA
ggagagagaagggtggaacc

SEQ ID NO: 2641 - DNA, 20 bp, synthetic construct
  source 1..20: mol_type = other DNA
agaggaagggagagagaagg

SEQ ID NO: 2642 - DNA, 20 bp, synthetic construct
  source 1..20: mol_type = other DNA
gggaaaggtcttctccagct

SEQ ID NO: 2643 - DNA, 20 bp, synthetic construct
  source 1..20: mol_type = other DNA
caggagggaaaggtcttctc

SEQ ID NO: 2644 - DNA, 20 bp, synthetic construct
  source 1..20: mol_type = other DNA
ggaatcaggagggaaaggtc

SEQ ID NO: 2645 - DNA, 20 bp, synthetic construct
  source 1..20: mol_type = other DNA
gggtcaagcagagctttctg

SEQ ID NO: 2646 - DNA, 20 bp, synthetic construct
  source 1..20: mol_type = other DNA
atgaataaacagggcctaga

SEQ ID NO: 2647 - DNA, 20 bp, synthetic construct
  source 1..20: mol_type = other DNA
ctgtgatgaataaacagggc

SEQ ID NO: 2648 - DNA, 20 bp, synthetic construct
  source 1..20: mol_type = other DNA
tgaatgactgaatgcttgag

SEQ ID NO: 2649 - DNA, 20 bp, synthetic construct
  source 1..20: mol_type = other DNA
tttgctgaatgactgaatgc

SEQ ID NO: 2650 - DNA, 20 bp, synthetic construct
  source 1..20: mol_type = other DNA
tctcattcatctgggccctg

SEQ ID NO: 2651 - DNA, 20 bp, synthetic construct
  source 1..20: mol_type = other DNA
tgggaaaaggtatgtgtgtg

SEQ ID NO: 2652 - DNA, 20 bp, synthetic construct
  source 1..20: mol_type = other DNA
cattatgggaaaaggtatgt

SEQ ID NO: 2653 - DNA, 20 bp, synthetic construct
  source 1..20: mol_type = other DNA
tttctcattatgggaaaagg

SEQ ID NO: 2654 - DNA, 20 bp, synthetic construct
  source 1..20: mol_type = other DNA
agccctttctcattatggga

SEQ ID NO: 2655 - DNA, 20 bp, synthetic construct
  source 1..20: mol_type = other DNA
tactcagccctttctcatta

SEQ ID NO: 2656 - DNA, 20 bp, synthetic construct
  source 1..20: mol_type = other DNA
ccctgtactcagccctttct

SEQ ID NO: 2657 - DNA, 20 bp, synthetic construct
  source 1..20: mol_type = other DNA
ctcacccctgtactcagccc

SEQ ID NO: 2658 - DNA, 20 bp, synthetic construct
  source 1..20: mol_type = other DNA
cccatctcacccctgtactc

SEQ ID NO: 2659 - DNA, 20 bp, synthetic construct
  source 1..20: mol_type = other DNA
cctgtcccatctcacccctg

SEQ ID NO: 2660 - DNA, 20 bp, synthetic construct
  source 1..20: mol_type = other DNA
ccctgcctgtcccatctcac

SEQ ID NO: 2661 - DNA, 20 bp, synthetic construct
  source 1..20: mol_type = other DNA
agtcttccttctcctccacc

SEQ ID NO: 2662 - DNA, 20 bp, synthetic construct
  source 1..20: mol_type = other DNA
tggaaagtcttccttctcct

SEQ ID NO: 2663 - DNA, 20 bp, synthetic construct
  source 1..20: mol_type = other DNA
ttctctggaaagtcttcctt

SEQ ID NO: 2664 - DNA, 20 bp, synthetic construct
  source 1..20: mol_type = other DNA
ttggtcagtcttttagcaca

SEQ ID NO: 2665 - DNA, 20 bp, synthetic construct
  source 1..20: mol_type = other DNA
ctagtttggtcagtctttta

SEQ ID NO: 2666 - DNA, 20 bp, synthetic construct
  source 1..20: mol_type = other DNA
aggtagagttctattgcttc

SEQ ID NO: 2667 - DNA, 20 bp, synthetic construct
  source 1..20: mol_type = other DNA
gtctccacttggtgcctcac

SEQ ID NO: 2668 - DNA, 20 bp, synthetic construct
  source 1..20: mol_type = other DNA
aagctgtctccacttggtgc

SEQ ID NO: 2669 - DNA, 20 bp, synthetic construct
  source 1..20: mol_type = other DNA
acaggaagctgtctccactt

SEQ ID NO: 2670 - DNA, 20 bp, synthetic construct
  source 1..20: mol_type = other DNA
ctcacacaggaagctgtctc

SEQ ID NO: 2671 - DNA, 20 bp, synthetic construct
  source 1..20: mol_type = other DNA
agctgccatctctggagggt

SEQ ID NO: 2672 - DNA, 20 bp, synthetic construct
  source 1..20: mol_type = other DNA
ggcaaagctgccatctctgg

SEQ ID NO: 2673 - DNA, 20 bp, synthetic construct
  source 1..20: mol_type = other DNA
gtcatggcaaagctgccatc

SEQ ID NO: 2674 - DNA, 20 bp, synthetic construct
  source 1..20: mol_type = other DNA
cctttcagcgggagtccaca

SEQ ID NO: 2675 - DNA, 20 bp, synthetic construct
  source 1..20: mol_type = other DNA
ttccaggctcctccaggcag

SEQ ID NO: 2676 - DNA, 20 bp, synthetic construct
  source 1..20: mol_type = other DNA
ctctcttccaggctcctcca

SEQ ID NO: 2677 - DNA, 20 bp, synthetic construct
  source 1..20: mol_type = other DNA
atgccacttcatcaaggctg

SEQ ID NO: 2678 - DNA, 20 bp, synthetic construct
  source 1..20: mol_type = other DNA
aagagatgccacttcatcaa

SEQ ID NO: 2679 - DNA, 20 bp, synthetic construct
  source 1..20: mol_type = other DNA
tgccaaagagatgccacttc

SEQ ID NO: 2680 - DNA, 20 bp, synthetic construct
  source 1..20: mol_type = other DNA
ccaagtgccaaagagatgcc

SEQ ID NO: 2681 - DNA, 20 bp, synthetic construct
  source 1..20: mol_type = other DNA
tcaggccaagtgccaaagag

SEQ ID NO: 2682 - DNA, 20 bp, synthetic construct
  source 1..20: mol_type = other DNA
ggaagtcaggccaagtgcca

SEQ ID NO: 2683 - DNA, 20 bp, synthetic construct
  source 1..20: mol_type = other DNA
gtctaggaagtcaggccaag

SEQ ID NO: 2684 - DNA, 20 bp, synthetic construct
  source 1..20: mol_type = other DNA
gggaggtctaggaagtcagg

SEQ ID NO: 2685 - DNA, 20 bp, synthetic construct
  source 1..20: mol_type = other DNA
ccccagggaggtctaggaag

SEQ ID NO: 2686 - DNA, 20 bp, synthetic construct
  source 1..20: mol_type = other DNA
tccagccccagggaggtcta

SEQ ID NO: 2687 - DNA, 20 bp, synthetic construct
  source 1..20: mol_type = other DNA
gctcttccagccccagggag

SEQ ID NO: 2688 - DNA, 20 bp, synthetic construct
  source 1..20: mol_type = other DNA
agagtgagggtcagtacata

SEQ ID NO: 2689 - DNA, 20 bp, synthetic construct
  source 1..20: mol_type = other DNA
gtagcagagtgagggtcagt

SEQ ID NO: 2690 - DNA, 20 bp, synthetic construct
  source 1..20: mol_type = other DNA
taggtgagtgagaaagtcac

SEQ ID NO: 2691 - DNA, 20 bp, synthetic construct
  source 1..20: mol_type = other DNA
catctgcaccataatctgca

SEQ ID NO: 2692 - DNA, 20 bp, synthetic construct
  source 1..20: mol_type = other DNA
tttacccaaaaggttcacag

SEQ ID NO: 2693 - DNA, 20 bp, synthetic construct
  source 1..20: mol_type = other DNA
attgatttacccaaaaggtt

SEQ ID NO: 2694 - DNA, 20 bp, synthetic construct
  source 1..20: mol_type = other DNA
gagtttgtgtttcccatttc

SEQ ID NO: 2695 - DNA, 20 bp, synthetic construct
  source 1..20: mol_type = other DNA
aaaaggagtttgtgtttccc

SEQ ID NO: 2696 - DNA, 20 bp, synthetic construct
  source 1..20: mol_type = other DNA
ataagaaaaggagtttgtgt

SEQ ID NO: 2697 - DNA, 20 bp, synthetic construct
  source 1..20: mol_type = other DNA
ctctaataagaaaaggagtt

SEQ ID NO: 2698 - DNA, 20 bp, synthetic construct
  source 1..20: mol_type = other DNA
ttctgctctaataagaaaag

SEQ ID NO: 2699 - DNA, 20 bp, synthetic construct
  source 1..20: mol_type = other DNA
gctaattctgctctaataag

SEQ ID NO: 2700 - DNA, 20 bp, synthetic construct
  source 1..20: mol_type = other DNA
gaatggctaattctgctcta

SEQ ID NO: 2701 - DNA, 20 bp, synthetic construct
  source 1..20: mol_type = other DNA
gcttagaatggctaattctg

SEQ ID NO: 2702 - DNA, 20 bp, synthetic construct
  source 1..20: mol_type = other DNA
gcagggcttagaatggctaa

SEQ ID NO: 2703 - DNA, 20 bp, synthetic construct
  source 1..20: mol_type = other DNA
cagaggcagggcttagaatg

SEQ ID NO: 2704 - DNA, 20 bp, synthetic construct
  source 1..20: mol_type = other DNA
ggaagcagaggcagggctta

SEQ ID NO: 2705 - DNA, 20 bp, synthetic construct
  source 1..20: mol_type = other DNA
acatgggaagcagaggcagg

SEQ ID NO: 2706 - DNA, 20 bp, synthetic construct
  source 1..20: mol_type = other DNA
aggtcacatgggaagcagag

SEQ ID NO: 2707 - DNA, 20 bp, synthetic construct
  source 1..20: mol_type = other DNA
tcctcactgtgcagatgaga

SEQ ID NO: 2708 - DNA, 20 bp, synthetic construct
  source 1..20: mol_type = other DNA
agtcctcctcactgtgcaga

SEQ ID NO: 2709 - DNA, 20 bp, synthetic construct
  source 1..20: mol_type = other DNA
caaccagtcctcctcactgt

SEQ ID NO: 2710 - DNA, 20 bp, synthetic construct
  source 1..20: mol_type = other DNA
catctcaaccagtcctcctc

SEQ ID NO: 2711 - DNA, 20 bp, synthetic construct
  source 1..20: mol_type = other DNA
ttagggacaagaatggaatc

SEQ ID NO: 2712 - DNA, 20 bp, synthetic construct
  source 1..20: mol_type = other DNA
agcagttagggacaagaatg

SEQ ID NO: 2713 - DNA, 20 bp, synthetic construct
  source 1..20: mol_type = other DNA
cccacagcagttagggacaa

SEQ ID NO: 2714 - DNA, 20 bp, synthetic construct
  source 1..20: mol_type = other DNA
ttttcacaaggagaagctga

SEQ ID NO: 2715 - DNA, 20 bp, synthetic construct
  source 1..20: mol_type = other DNA
caccattttcacaaggagaa

SEQ ID NO: 2716 - DNA, 20 bp, synthetic construct
  source 1..20: mol_type = other DNA
gagtgcaccattttcacaag

SEQ ID NO: 2717 - DNA, 20 bp, synthetic construct
  source 1..20: mol_type = other DNA
atcacaatatatgggcaagc

SEQ ID NO: 2718 - DNA, 20 bp, synthetic construct
  source 1..20: mol_type = other DNA
tccccatcacaatatatggg

SEQ ID NO: 2719 - DNA, 20 bp, synthetic construct
  source 1..20: mol_type = other DNA
caaggaatctccaaaatacg

SEQ ID NO: 2720 - DNA, 20 bp, synthetic construct
  source 1..20: mol_type = other DNA
atggcaacactactagcttg

SEQ ID NO: 2721 - DNA, 20 bp, synthetic construct
  source 1..20: mol_type = other DNA
ctgccatggcaacactacta

SEQ ID NO: 2722 - DNA, 20 bp, synthetic construct
  source 1..20: mol_type = other DNA
tagctactgcagtggaaggg

SEQ ID NO: 2723 - DNA, 20 bp, synthetic construct
  source 1..20: mol_type = other DNA
aaaagtagctactgcagtgg

SEQ ID NO: 2724 - DNA, 20 bp, synthetic construct
  source 1..20: mol_type = other DNA
attcaaaaagtagctactgc

SEQ ID NO: 2725 - DNA, 20 bp, synthetic construct
  source 1..20: mol_type = other DNA
agcacattcaaaaagtagct

SEQ ID NO: 2726 - DNA, 20 bp, synthetic construct
  source 1..20: mol_type = other DNA
ctggacatgattgctgagga

SEQ ID NO: 2727 - DNA, 20 bp, synthetic construct
  source 1..20: mol_type = other DNA
ggaccctggacatgattgct

SEQ ID NO: 2728 - DNA, 20 bp, synthetic construct
  source 1..20: mol_type = other DNA
atccaggaccctggacatga

SEQ ID NO: 2729 - DNA, 20 bp, synthetic construct
  source 1..20: mol_type = other DNA
ttcctgataccgaacatgga

SEQ ID NO: 2730 - DNA, 20 bp, synthetic construct
  source 1..20: mol_type = other DNA
ggtaaggccaaggaagtgag

SEQ ID NO: 2731 - DNA, 20 bp, synthetic construct
  source 1..20: mol_type = other DNA
caagaggtaaggccaaggaa

SEQ ID NO: 2732 - DNA, 20 bp, synthetic construct
  source 1..20: mol_type = other DNA
acctgggtttttgtgtattc

SEQ ID NO: 2733 - DNA, 20 bp, synthetic construct
  source 1..20: mol_type = other DNA
catacacctgggtttttgtg

SEQ ID NO: 2734 - DNA, 20 bp, synthetic construct
  source 1..20: mol_type = other DNA
tactccatacacctgggttt

SEQ ID NO: 2735 - DNA, 20 bp, synthetic construct
  source 1..20: mol_type = other DNA
ttatccacagaagatctccc

SEQ ID NO: 2736 - DNA, 20 bp, synthetic construct
  source 1..20: mol_type = other DNA
ctgagtgctgctaacttggg

SEQ ID NO: 2737 - DNA, 20 bp, synthetic construct
  source 1..20: mol_type = other DNA
gaaatctgagtgctgctaac

SEQ ID NO: 2738 - DNA, 20 bp, synthetic construct
  source 1..20: mol_type = other DNA
cactaaattaggaagctggg

SEQ ID NO: 2739 - DNA, 20 bp, synthetic construct
  source 1..20: mol_type = other DNA
ccctctctaggtttccccat

SEQ ID NO: 2740 - DNA, 20 bp, synthetic construct
  source 1..20: mol_type = other DNA
tcctcccctctctaggtttc

SEQ ID NO: 2741 - DNA, 20 bp, synthetic construct
  source 1..20: mol_type = other DNA
cctcttcctcccctctctag

SEQ ID NO: 2742 - DNA, 20 bp, synthetic construct
  source 1..20: mol_type = other DNA
ctaagcctcttcctcccctc

SEQ ID NO: 2743 - DNA, 20 bp, synthetic construct
  source 1..20: mol_type = other DNA
gcctgctgcagggagccagg

SEQ ID NO: 2744 - DNA, 20 bp, synthetic construct
  source 1..20: mol_type = other DNA
ggccatcaggaccctgcagg

SEQ ID NO: 2745 - DNA, 20 bp, synthetic construct
  source 1..20: mol_type = other DNA
aagtgggccatcaggaccct

SEQ ID NO: 2746 - DNA, 20 bp, synthetic construct
  source 1..20: mol_type = other DNA
gtgtgccaggtgggaagtgg

SEQ ID NO: 2747 - DNA, 20 bp, synthetic construct
  source 1..20: mol_type = other DNA
gctaggtgtgccaggtggga

SEQ ID NO: 2748 - DNA, 20 bp, synthetic construct
  source 1..20: mol_type = other DNA
gctatgctaggtgtgccagg

SEQ ID NO: 2749 - DNA, 20 bp, synthetic construct
  source 1..20: mol_type = other DNA
acacagctatgctaggtgtg

SEQ ID NO: 2750 - DNA, 20 bp, synthetic construct
  source 1..20: mol_type = other DNA
ccagcacacagctatgctag

SEQ ID NO: 2751 - DNA, 20 bp, synthetic construct
  source 1..20: mol_type = other DNA
gagagccagcacacagctat

SEQ ID NO: 2752 - DNA, 20 bp, synthetic construct
  source 1..20: mol_type = other DNA
tactggagagccagcacaca

SEQ ID NO: 2753 - DNA, 20 bp, synthetic construct
  source 1..20: mol_type = other DNA
caaactactggagagccagc

SEQ ID NO: 2754 - DNA, 20 bp, synthetic construct
  source 1..20: mol_type = other DNA
tgggacatctggcccaaagg

SEQ ID NO: 2755 - DNA, 20 bp, synthetic construct
  source 1..20: mol_type = other DNA
cccactgggacatctggccc

SEQ ID NO: 2756 - DNA, 20 bp, synthetic construct
  source 1..20: mol_type = other DNA
cttaaagcagggcccactgg

SEQ ID NO: 2757 - DNA, 20 bp, synthetic construct
  source 1..20: mol_type = other DNA
gtatccttaaagcagggccc

SEQ ID NO: 2758 - DNA, 20 bp, synthetic construct
  source 1..20: mol_type = other DNA
ttcttttctgaaaagattaa

SEQ ID NO: 2759 - DNA, 20 bp, synthetic construct
  source 1..20: mol_type = other DNA
gtgagttcttttctgaaaag

SEQ ID NO: 2760 - DNA, 20 bp, synthetic construct
  source 1..20: mol_type = other DNA
actggtgcctaagagcccta

SEQ ID NO: 2761 - DNA, 20 bp, synthetic construct
  source 1..20: mol_type = other DNA
cctccactggtgcctaagag

SEQ ID NO: 2762 - DNA, 20 bp, synthetic construct
  source 1..20: mol_type = other DNA
cactccctccactggtgcct

SEQ ID NO: 2763 - DNA, 20 bp, synthetic construct
  source 1..20: mol_type = other DNA
agaagacagccagtcagagc

SEQ ID NO: 2764 - DNA, 20 bp, synthetic construct
  source 1..20: mol_type = other DNA
ggcagagaagacagccagtc

SEQ ID NO: 2765 - DNA, 20 bp, synthetic construct
  source 1..20: mol_type = other DNA
ctgaaggcagagaagacagc

SEQ ID NO: 2766 - DNA, 20 bp, synthetic construct
  source 1..20: mol_type = other DNA
ctaccctgaaggcagagaag

SEQ ID NO: 2767 - DNA, 20 bp, synthetic construct
  source 1..20: mol_type = other DNA
ggcctctaccctgaaggcag

SEQ ID NO: 2768 - DNA, 20 bp, synthetic construct
  source 1..20: mol_type = other DNA
tgtcagaaaggactcctctg

SEQ ID NO: 2769 - DNA, 20 bp, synthetic construct
  source 1..20: mol_type = other DNA
acagctgtcagaaaggactc

SEQ ID NO: 2770 - DNA, 20 bp, synthetic construct
  source 1..20: mol_type = other DNA
cctcaacagctgtcagaaag

SEQ ID NO: 2771 - DNA, 20 bp, synthetic construct
  source 1..20: mol_type = other DNA
acccaccccagcctgttgca

SEQ ID NO: 2772 - DNA, 20 bp, synthetic construct
  source 1..20: mol_type = other DNA
caagcagatccacagtgatg

SEQ ID NO: 2773 - DNA, 20 bp, synthetic construct
  source 1..20: mol_type = other DNA
agtttcaagcagatccacag

SEQ ID NO: 2774 - DNA, 20 bp, synthetic construct
  source 1..20: mol_type = other DNA
cccccaacaatctagccact

SEQ ID NO: 2775 - DNA, 20 bp, synthetic construct
  source 1..20: mol_type = other DNA
agttacccccaacaatctag

SEQ ID NO: 2776 - DNA, 20 bp, synthetic construct
  source 1..20: mol_type = other DNA
ttcccagttacccccaacaa

SEQ ID NO: 2777 - DNA, 20 bp, synthetic construct
  source 1..20: mol_type = other DNA
ctcagttcccagttaccccc

SEQ ID NO: 2778 - DNA, 20 bp, synthetic construct
  source 1..20: mol_type = other DNA
caaccctcagttcccagtta

SEQ ID NO: 2779 - DNA, 20 bp, synthetic construct
  source 1..20: mol_type = other DNA
tctgacttaggactaggtta

SEQ ID NO: 2780 - DNA, 20 bp, synthetic construct
  source 1..20: mol_type = other DNA
ctcattctgacttaggacta

SEQ ID NO: 2781 - DNA, 20 bp, synthetic construct
  source 1..20: mol_type = other DNA
atgttctcattctgacttag

SEQ ID NO: 2782 - DNA, 20 bp, synthetic construct
  source 1..20: mol_type = other DNA
gagtaatgttctcattctga

SEQ ID NO: 2783 - DNA, 20 bp, synthetic construct
  source 1..20: mol_type = other DNA
catgagagtaatgttctcat

SEQ ID NO: 2784 - DNA, 20 bp, synthetic construct
  source 1..20: mol_type = other DNA
ggaagtgatgtaggtgaggg

SEQ ID NO: 2785 - DNA, 20 bp, synthetic construct
  source 1..20: mol_type = other DNA
agcctagatgagcccttggt

SEQ ID NO: 2786 - DNA, 20 bp, synthetic construct
  source 1..20: mol_type = other DNA
ttctcagcctagatgagccc

SEQ ID NO: 2787 - DNA, 20 bp, synthetic construct
  source 1..20: mol_type = other DNA
ctcctttctcagcctagatg

SEQ ID NO: 2788 - DNA, 20 bp, synthetic construct
  source 1..20: mol_type = other DNA
tggccctcctttctcagcct

SEQ ID NO: 2789 - DNA, 20 bp, synthetic construct
  source 1..20: mol_type = other DNA
actcttggccctcctttctc

SEQ ID NO: 2790 - DNA, 20 bp, synthetic construct
  source 1..20: mol_type = other DNA
acattactcttggccctcct

SEQ ID NO: 2791 - DNA, 20 bp, synthetic construct
  source 1..20: mol_type = other DNA
ttgctgttgaatttgagggc

SEQ ID NO: 2792 - DNA, 20 bp, synthetic construct
  source 1..20: mol_type = other DNA
agtacttgctgttgaatttg

SEQ ID NO: 2793 - DNA, 20 bp, synthetic construct
  source 1..20: mol_type = other DNA
cagcactaatttttacaact

SEQ ID NO: 2794 - DNA, 20 bp, synthetic construct
  source 1..20: mol_type = other DNA
atctgtaacatgagggttgg

SEQ ID NO: 2795 - DNA, 20 bp, synthetic construct
  source 1..20: mol_type = other DNA
atcccatctgtaacatgagg

SEQ ID NO: 2796 - DNA, 20 bp, synthetic construct
  source 1..20: mol_type = other DNA
cagtgatcccatctgtaaca

SEQ ID NO: 2797 - DNA, 20 bp, synthetic construct
  source 1..20: mol_type = other DNA
gcctggctttgataaccctg

SEQ ID NO: 2798 - DNA, 20 bp, synthetic construct
  source 1..20: mol_type = other DNA
ttctagcctggctttgataa

SEQ ID NO: 2799 - DNA, 20 bp, synthetic construct
  source 1..20: mol_type = other DNA
cagactgggagatggatctg

SEQ ID NO: 2800 - DNA, 20 bp, synthetic construct
  source 1..20: mol_type = other DNA
ggccacagactgggagatgg

SEQ ID NO: 2801 - DNA, 20 bp, synthetic construct
  source 1..20: mol_type = other DNA
agtcaggccacagactggga

SEQ ID NO: 2802 - DNA, 20 bp, synthetic construct
  source 1..20: mol_type = other DNA
taaggagtcaggccacagac

SEQ ID NO: 2803 - DNA, 20 bp, synthetic construct
  source 1..20: mol_type = other DNA
tggcttaaggagtcaggcca

SEQ ID NO: 2804 - DNA, 20 bp, synthetic construct
  source 1..20: mol_type = other DNA
tctcttggcttaaggagtca

SEQ ID NO: 2805 - DNA, 20 bp, synthetic construct
  source 1..20: mol_type = other DNA
gccctgcactcagcccttca

SEQ ID NO: 2806 - DNA, 20 bp, synthetic construct
  source 1..20: mol_type = other DNA
acagagccctgcactcagcc

SEQ ID NO: 2807 - DNA, 20 bp, synthetic construct
  source 1..20: mol_type = other DNA
gacaaccttcactcattcag

SEQ ID NO: 2808 - DNA, 20 bp, synthetic construct
  source 1..20: mol_type = other DNA
atccactagggcaggcttgg

SEQ ID NO: 2809 - DNA, 20 bp, synthetic construct
  source 1..20: mol_type = other DNA
ggccaggaggaagagtttgg

SEQ ID NO: 2810 - DNA, 20 bp, synthetic construct
  source 1..20: mol_type = other DNA
tcataggccaggaggaagag

SEQ ID NO: 2811 - DNA, 20 bp, synthetic construct
  source 1..20: mol_type = other DNA
ttacttcataggccaggagg

SEQ ID NO: 2812 - DNA, 20 bp, synthetic construct
  source 1..20: mol_type = other DNA
tggcagtggaggctgttcac

SEQ ID NO: 2813 - DNA, 20 bp, synthetic construct
  source 1..20: mol_type = other DNA
gcaggaacaggaagaccacc

SEQ ID NO: 2814 - DNA, 20 bp, synthetic construct
  source 1..20: mol_type = other DNA
atgctgcaggaacaggaaga

SEQ ID NO: 2815 - DNA, 20 bp, synthetic construct
  source 1..20: mol_type = other DNA
gagtaatgctgcaggaacag

SEQ ID NO: 2816 - DNA, 20 bp, synthetic construct
  source 1..20: mol_type = other DNA
attgggagtaatgctgcagg

SEQ ID NO: 2817 - DNA, 20 bp, synthetic construct
  source 1..20: mol_type = other DNA
tggctctctagatagggtgg

SEQ ID NO: 2818 - DNA, 20 bp, synthetic construct
  source 1..20: mol_type = other DNA
taaaagaagatgtggtgatt

SEQ ID NO: 2819 - DNA, 20 bp, synthetic construct
  source 1..20: mol_type = other DNA
aaaaataaaagaagatgtgg

SEQ ID NO: 2820 - DNA, 20 bp, synthetic construct
  source 1..20: mol_type = other DNA
gctataaaaataaaagaaga

SEQ ID NO: 2821 - DNA, 20 bp, synthetic construct
  source 1..20: mol_type = other DNA
taaaggctataaaaataaaa

SEQ ID NO: 2822 - DNA, 20 bp, synthetic construct
  source 1..20: mol_type = other DNA
attgcttaaacagataagca

SEQ ID NO: 2823 - DNA, 20 bp, synthetic construct
  source 1..20: mol_type = other DNA
agacaattgcttaaacagat

SEQ ID NO: 2824 - DNA, 20 bp, synthetic construct
  source 1..20: mol_type = other DNA
gttcctgtttccaagggact

SEQ ID NO: 2825 - DNA, 20 bp, synthetic construct
  source 1..20: mol_type = other DNA
acaaggttcctgtttccaag

SEQ ID NO: 2826 - DNA, 20 bp, synthetic construct
  source 1..20: mol_type = other DNA
gacagacaaggttcctgttt

SEQ ID NO: 2827 - DNA, 20 bp, synthetic construct
  source 1..20: mol_type = other DNA
agaaagacagacaaggttcc

SEQ ID NO: 2828 - DNA, 20 bp, synthetic construct
  source 1..20: mol_type = other DNA
cactgagaaagacagacaag

SEQ ID NO: 2829 - DNA, 20 bp, synthetic construct
  source 1..20: mol_type = other DNA
cacagcactgagaaagacag

SEQ ID NO: 2830 - DNA, 20 bp, synthetic construct
  source 1..20: mol_type = other DNA
gccaggcactgtgctagatg

SEQ ID NO: 2831 - DNA, 20 bp, synthetic construct
  source 1..20: mol_type = other DNA
ccagtgccaggcactgtgct

SEQ ID NO: 2832 - DNA, 20 bp, synthetic construct
  source 1..20: mol_type = other DNA
tattaccagtgccaggcact

SEQ ID NO: 2833 - DNA, 20 bp, synthetic construct
  source 1..20: mol_type = other DNA
gtacctattaccagtgccag

SEQ ID NO: 2834 - DNA, 20 bp, synthetic construct
  source 1..20: mol_type = other DNA
actaagtacctattaccagt

SEQ ID NO: 2835 - DNA, 20 bp, synthetic construct
  source 1..20: mol_type = other DNA
agctaaaagcagggcttcct

SEQ ID NO: 2836 - DNA, 20 bp, synthetic construct
  source 1..20: mol_type = other DNA
gctccttgccagactgtggg

SEQ ID NO: 2837 - DNA, 20 bp, synthetic construct
  source 1..20: mol_type = other DNA
agccagctccttgccagact

SEQ ID NO: 2838 - DNA, 20 bp, synthetic construct
  source 1..20: mol_type = other DNA
cttggagccagctccttgcc

SEQ ID NO: 2839 - DNA, 20 bp, synthetic construct
  source 1..20: mol_type = other DNA
tcagccttggagccagctcc

SEQ ID NO: 2840 - DNA, 20 bp, synthetic construct
  source 1..20: mol_type = other DNA
gccactcagccttggagcca

SEQ ID NO: 2841 - DNA, 20 bp, synthetic construct
  source 1..20: mol_type = other DNA
ggaagcagtaagggtgacca

SEQ ID NO: 2842 - DNA, 20 bp, synthetic construct
  source 1..20: mol_type = other DNA
agccctgggaagcagtaagg

SEQ ID NO: 2843 - DNA, 20 bp, synthetic construct
  source 1..20: mol_type = other DNA
taataagccctgggaagcag

SEQ ID NO: 2844 - DNA, 20 bp, synthetic construct
  source 1..20: mol_type = other DNA
atccccagagaggaagtgaa

SEQ ID NO: 2845 - DNA, 20 bp, synthetic construct
  source 1..20: mol_type = other DNA
ataaccacagcgataatcac

SEQ ID NO: 2846 - DNA, 20 bp, synthetic construct
  source 1..20: mol_type = other DNA
ggcagataaccacagcgata

SEQ ID NO: 2847 - DNA, 20 bp, synthetic construct
  source 1..20: mol_type = other DNA
cagcacccacaccaagaggg

SEQ ID NO: 2848 - DNA, 20 bp, synthetic construct
  source 1..20: mol_type = other DNA
tcagaggctactggctggat

SEQ ID NO: 2849 - DNA, 20 bp, synthetic construct
  source 1..20: mol_type = other DNA
ggctgtcagaggctactggc

SEQ ID NO: 2850 - DNA, 20 bp, synthetic construct
  source 1..20: mol_type = other DNA
aaaaggactcaagtgagaga

SEQ ID NO: 2851 - DNA, 20 bp, synthetic construct
  source 1..20: mol_type = other DNA
aacagaaaaggactcaagtg

SEQ ID NO: 2852 - DNA, 20 bp, synthetic construct
  source 1..20: mol_type = other DNA
cagggaacagaaaaggactc

SEQ ID NO: 2853 - DNA, 20 bp, synthetic construct
  source 1..20: mol_type = other DNA
ggacacagggaacagaaaag

SEQ ID NO: 2854 - DNA, 20 bp, synthetic construct
  source 1..20: mol_type = other DNA
tcaaaggacacagggaacag

SEQ ID NO: 2855 - DNA, 20 bp, synthetic construct
  source 1..20: mol_type = other DNA
ggacatcaaaggacacaggg

SEQ ID NO: 2856 - DNA, 20 bp, synthetic construct
  source 1..20: mol_type = other DNA
cctaaggacatcaaaggaca

SEQ ID NO: 2857 - DNA, 20 bp, synthetic construct
  source 1..20: mol_type = other DNA
gcatgaacaagggcaagtcc

SEQ ID NO: 2858 - DNA, 20 bp, synthetic construct
  source 1..20: mol_type = other DNA
agaacatccctatcccactg

SEQ ID NO: 2859 - DNA, 20 bp, synthetic construct
  source 1..20: mol_type = other DNA
cacagagaacatccctatcc

SEQ ID NO: 2860 - DNA, 20 bp, synthetic construct
  source 1..20: mol_type = other DNA
cctgtggatggcagagccga

SEQ ID NO: 2861 - DNA, 20 bp, synthetic construct
  source 1..20: mol_type = other DNA
cccagcctgtggatggcaga

SEQ ID NO: 2862 - DNA, 20 bp, synthetic construct
  source 1..20: mol_type = other DNA
cagctcccagcctgtggatg

SEQ ID NO: 2863 - DNA, 20 bp, synthetic construct
  source 1..20: mol_type = other DNA
catgacagccagggtcactg

SEQ ID NO: 2864 - DNA, 20 bp, synthetic construct
  source 1..20: mol_type = other DNA
caaaaacatgacagccaggg

SEQ ID NO: 2865 - DNA, 20 bp, synthetic construct
  source 1..20: mol_type = other DNA
taagtcaaaaacatgacagc

SEQ ID NO: 2866 - DNA, 20 bp, synthetic construct
  source 1..20: mol_type = other DNA
aactctaagtcaaaaacatg

SEQ ID NO: 2867 - DNA, 20 bp, synthetic construct
  source 1..20: mol_type = other DNA
gaacaaactctaagtcaaaa

SEQ ID NO: 2868 - DNA, 20 bp, synthetic construct
  source 1..20: mol_type = other DNA
ctaaggaacaaactctaagt

SEQ ID NO: 2869 - DNA, 20 bp, synthetic construct
  source 1..20: mol_type = other DNA
ttctcctaaggaacaaactc

SEQ ID NO: 2870 - DNA, 20 bp, synthetic construct
  source 1..20: mol_type = other DNA
acaagttctcctaaggaaca

SEQ ID NO: 2871 - DNA, 20 bp, synthetic construct
  source 1..20: mol_type = other DNA
agagtacaagttctcctaag

SEQ ID NO: 2872 - DNA, 20 bp, synthetic construct
  source 1..20: mol_type = other DNA
tcgctagagtacaagttctc

SEQ ID NO: 2873 - DNA, 20 bp, synthetic construct
  source 1..20: mol_type = other DNA
tcctgacatgatattaagtg

SEQ ID NO: 2874 - DNA, 20 bp, synthetic construct
  source 1..20: mol_type = other DNA
aatgttcctgacatgatatt

SEQ ID NO: 2875 - DNA, 20 bp, synthetic construct
  source 1..20: mol_type = other DNA
atgatgtaaatccttgcacc

SEQ ID NO: 2876 - DNA, 20 bp, synthetic construct
  source 1..20: mol_type = other DNA
attccatgatgtaaatcctt

SEQ ID NO: 2877 - DNA, 20 bp, synthetic construct
  source 1..20: mol_type = other DNA
cctacattccatgatgtaaa

SEQ ID NO: 2878 - DNA, 20 bp, synthetic construct
  source 1..20: mol_type = other DNA
cccttcctacattccatgat

SEQ ID NO: 2879 - DNA, 20 bp, synthetic construct
  source 1..20: mol_type = other DNA
accagcccttcctacattcc

SEQ ID NO: 2880 - DNA, 20 bp, synthetic construct
  source 1..20: mol_type = other DNA
ttcataccagcccttcctac

SEQ ID NO: 2881 - DNA, 20 bp, synthetic construct
  source 1..20: mol_type = other DNA
aagctgaactgactggtttg

SEQ ID NO: 2882 - DNA, 20 bp, synthetic construct
  source 1..20: mol_type = other DNA
ccagaaagctgaactgactg

SEQ ID NO: 2883 - DNA, 20 bp, synthetic construct
  source 1..20: mol_type = other DNA
agatcccagaaagctgaact

SEQ ID NO: 2884 - DNA, 20 bp, synthetic construct
  source 1..20: mol_type = other DNA
aaagtagatcccagaaagct

SEQ ID NO: 2885 - DNA, 20 bp, synthetic construct
  source 1..20: mol_type = other DNA
tcaccaaagtagatcccaga

SEQ ID NO: 2886 - DNA, 20 bp, synthetic construct
  source 1..20: mol_type = other DNA
atctttcaccaaagtagatc

SEQ ID NO: 2887 - DNA, 20 bp, synthetic construct
  source 1..20: mol_type = other DNA
acccaatctttcaccaaagt

SEQ ID NO: 2888 - DNA, 20 bp, synthetic construct
  source 1..20: mol_type = other DNA
actccacccaatctttcacc

SEQ ID NO: 2889 - DNA, 20 bp, synthetic construct
  source 1..20: mol_type = other DNA
cccctactccacccaatctt

SEQ ID NO: 2890 - DNA, 20 bp, synthetic construct
  source 1..20: mol_type = other DNA
gccctcccctactccaccca

SEQ ID NO: 2891 - DNA, 20 bp, synthetic construct
  source 1..20: mol_type = other DNA
tcagtgccctcccctactcc

SEQ ID NO: 2892 - DNA, 20 bp, synthetic construct
  source 1..20: mol_type = other DNA
tgcccagataacaaaatgtg

SEQ ID NO: 2893 - DNA, 20 bp, synthetic construct
  source 1..20: mol_type = other DNA
ggagatgcccagataacaaa

SEQ ID NO: 2894 - DNA, 20 bp, synthetic construct
  source 1..20: mol_type = other DNA
caaggatctagaaggcaggt

SEQ ID NO: 2895 - DNA, 20 bp, synthetic construct
  source 1..20: mol_type = other DNA
aggaccaaggatctagaagg

SEQ ID NO: 2896 - DNA, 20 bp, synthetic construct
  source 1..20: mol_type = other DNA
cttcaaggaccaaggatcta

SEQ ID NO: 2897 - DNA, 20 bp, synthetic construct
  source 1..20: mol_type = other DNA
agtatcttcaaggaccaagg

SEQ ID NO: 2898 - DNA, 20 bp, synthetic construct
  source 1..20: mol_type = other DNA
aggcaaactaggccactggg

SEQ ID NO: 2899 - DNA, 20 bp, synthetic construct
  source 1..20: mol_type = other DNA
cacagaggcaaactaggcca

SEQ ID NO: 2900 - DNA, 20 bp, synthetic construct
  source 1..20: mol_type = other DNA
ctcacaacagtgggacctta

SEQ ID NO: 2901 - DNA, 20 bp, synthetic construct
  source 1..20: mol_type = other DNA
accagctcacaacagtggga

SEQ ID NO: 2902 - DNA, 20 bp, synthetic construct
  source 1..20: mol_type = other DNA
tgttcaccagctcacaacag

SEQ ID NO: 2903 - DNA, 20 bp, synthetic construct
  source 1..20: mol_type = other DNA
catggtctctacttgaatac

SEQ ID NO: 2904 - DNA, 20 bp, synthetic construct
  source 1..20: mol_type = other DNA
gaatccatggtctctacttg

SEQ ID NO: 2905 - DNA, 20 bp, synthetic construct
  source 1..20: mol_type = other DNA
tcacagaatccatggtctct

SEQ ID NO: 2906 - DNA, 20 bp, synthetic construct
  source 1..20: mol_type = other DNA
tcccttcacagaatccatgg

SEQ ID NO: 2907 - DNA, 20 bp, synthetic construct
  source 1..20: mol_type = other DNA
ggacttcccttcacagaatc

SEQ ID NO: 2908 - DNA, 20 bp, synthetic construct
  source 1..20: mol_type = other DNA
tcacaggacttcccttcaca

SEQ ID NO: 2909 - DNA, 20 bp, synthetic construct
  source 1..20: mol_type = other DNA
acctacccatactcccacag

SEQ ID NO: 2910 - DNA, 20 bp, synthetic construct
  source 1..20: mol_type = other DNA
cacccacctacccatactcc

SEQ ID NO: 2911 - DNA, 20 bp, synthetic construct
  source 1..20: mol_type = other DNA
gcatgcacccacctacccat

SEQ ID NO: 2912 - DNA, 20 bp, synthetic construct
  source 1..20: mol_type = other DNA
ccccagcatgcacccaccta

SEQ ID NO: 2913 - DNA, 20 bp, synthetic construct
  source 1..20: mol_type = other DNA
gcttcccccagcatgcaccc

SEQ ID NO: 2914 - DNA, 20 bp, synthetic construct
  source 1..20: mol_type = other DNA
ggcacaggacagccctccaa

SEQ ID NO: 2915 - DNA, 20 bp, synthetic construct
  source 1..20: mol_type = other DNA
tgtcctgatgaactctgcaa

SEQ ID NO: 2916 - DNA, 20 bp, synthetic construct
  source 1..20: mol_type = other DNA
tgtcagagggctcttctgaa

SEQ ID NO: 2917 - DNA, 20 bp, synthetic construct
  source 1..20: mol_type = other DNA
gcaggtgtcagagggctctt

SEQ ID NO: 2918 - DNA, 20 bp, synthetic construct
  source 1..20: mol_type = other DNA
tctcatgctaggtcctgtgc

SEQ ID NO: 2919 - DNA, 20 bp, synthetic construct
  source 1..20: mol_type = other DNA
ctctgctacatcaaaacttg

SEQ ID NO: 2920 - DNA, 20 bp, synthetic construct
  source 1..20: mol_type = other DNA
gactcctctgctacatcaaa

SEQ ID NO: 2921 - DNA, 20 bp, synthetic construct
  source 1..20: mol_type = other DNA
gaaaggactcctctgctaca

SEQ ID NO: 2922 - DNA, 20 bp, synthetic construct
  source 1..20: mol_type = other DNA
ttgggtctgatcaattatta

SEQ ID NO: 2923 - DNA, 20 bp, synthetic construct
  source 1..20: mol_type = other DNA
tgtggttgggtctgatcaat

SEQ ID NO: 2924 - DNA, 20 bp, synthetic construct
  source 1..20: mol_type = other DNA
ggtttctgggctgtggttgg

SEQ ID NO: 2925 - DNA, 20 bp, synthetic construct
  source 1..20: mol_type = other DNA
gatgctgggccggtttctgg

SEQ ID NO: 2926 - DNA, 20 bp, synthetic construct
  source 1..20: mol_type = other DNA
caggagatctgcctgtccaa

SEQ ID NO: 2927 - DNA, 20 bp, synthetic construct
  source 1..20: mol_type = other DNA
tagctcaggagatctgcctg

SEQ ID NO: 2928 - DNA, 20 bp, synthetic construct
  source 1..20: mol_type = other DNA
agcagtagctcaggagatct

SEQ ID NO: 2929 - DNA, 20 bp, synthetic construct
  source 1..20: mol_type = other DNA
taattagcagtagctcagga

SEQ ID NO: 2930 - DNA, 20 bp, synthetic construct
  source 1..20: mol_type = other DNA
aggtttgagaggcagaggga

SEQ ID NO: 2931 - DNA, 20 bp, synthetic construct
  source 1..20: mol_type = other DNA
ccagcaggtttgagaggcag

SEQ ID NO: 2932 - DNA, 20 bp, synthetic construct
  source 1..20: mol_type = other DNA
ttctgccagcaggtttgaga

SEQ ID NO: 2933 - DNA, 20 bp, synthetic construct
  source 1..20: mol_type = other DNA
tgagcttctgccagcaggtt

SEQ ID NO: 2934 - DNA, 20 bp, synthetic construct
  source 1..20: mol_type = other DNA
ccaggtgagcttctgccagc

SEQ ID NO: 2935 - DNA, 20 bp, synthetic construct
  source 1..20: mol_type = other DNA
gcttgccaggtgagcttctg

SEQ ID NO: 2936 - DNA, 20 bp, synthetic construct
  source 1..20: mol_type = other DNA
tctttgcttgccaggtgagc

SEQ ID NO: 2937 - DNA, 20 bp, synthetic construct
  source 1..20: mol_type = other DNA
tccagggagagaccaacagg

SEQ ID NO: 2938 - DNA, 20 bp, synthetic construct
  source 1..20: mol_type = other DNA
tctggtccagggagagacca

SEQ ID NO: 2939 - DNA, 20 bp, synthetic construct
  source 1..20: mol_type = other DNA
aaatctctggtccagggaga

SEQ ID NO: 2940 - DNA, 20 bp, synthetic construct
  source 1..20: mol_type = other DNA
gtgaaaaatctctggtccag

SEQ ID NO: 2941 - DNA, 20 bp, synthetic construct
  source 1..20: mol_type = other DNA
aagtggtgaaaaatctctgg

SEQ ID NO: 2942 - DNA, 20 bp, synthetic construct
  source 1..20: mol_type = other DNA
gcacaaagtggtgaaaaatc

SEQ ID NO: 2943 - DNA, 20 bp, synthetic construct
  source 1..20: mol_type = other DNA
ccatggcacaaagtggtgaa

SEQ ID NO: 2944 - DNA, 20 bp, synthetic construct
  source 1..20: mol_type = other DNA
gggttccatggcacaaagtg

SEQ ID NO: 2945 - DNA, 20 bp, synthetic construct
  source 1..20: mol_type = other DNA
attaaatactctaaaacact

SEQ ID NO: 2946 - DNA, 20 bp, synthetic construct
  source 1..20: mol_type = other DNA
cttgtattaaatactctaaa

SEQ ID NO: 2947 - DNA, 20 bp, synthetic construct
  source 1..20: mol_type = other DNA
tgcaccttgtattaaatact

SEQ ID NO: 2948 - DNA, 20 bp, synthetic construct
  source 1..20: mol_type = other DNA
tccaatgcaccttgtattaa

SEQ ID NO: 2949 - DNA, 20 bp, synthetic construct
  source 1..20: mol_type = other DNA
tgaaatccaatgcaccttgt

SEQ ID NO: 2950 - DNA, 20 bp, synthetic construct
  source 1..20: mol_type = other DNA
tcctttgaaatccaatgcac

SEQ ID NO: 2951 - DNA, 20 bp, synthetic construct
  source 1..20: mol_type = other DNA
tagtttcctttgaaatccaa

SEQ ID NO: 2952 - DNA, 20 bp, synthetic construct
  source 1..20: mol_type = other DNA
tgttactacatgtctaatca

SEQ ID NO: 2953 - DNA, 20 bp, synthetic construct
  source 1..20: mol_type = other DNA
gcacctgttactacatgtct

SEQ ID NO: 2954 - DNA, 20 bp, synthetic construct
  source 1..20: mol_type = other DNA
aaaaggcacctgttactaca

SEQ ID NO: 2955 - DNA, 20 bp, synthetic construct
  source 1..20: mol_type = other DNA
taataaaaaggcacctgtta

SEQ ID NO: 2956 - DNA, 20 bp, synthetic construct
  source 1..20: mol_type = other DNA
aaataacaaaggtattttca

SEQ ID NO: 2957 - DNA, 20 bp, synthetic construct
  source 1..20: mol_type = other DNA
caaataaataacaaaggtat

SEQ ID NO: 2958 - DNA, 20 bp, synthetic construct
  source 1..20: mol_type = other DNA
tgacacaaataaataacaaa

SEQ ID NO: 2959 - DNA, 20 bp, synthetic construct
  source 1..20: mol_type = other DNA
tcacagaattatcagcagta

SEQ ID NO: 2960 - DNA, 20 bp, synthetic construct
  source 1..20: mol_type = other DNA
ataaatcacagaattatcag

SEQ ID NO: 2961 - DNA, 20 bp, synthetic construct
  source 1..20: mol_type = other DNA
catttccttcacttaccaat

SEQ ID NO: 2962 - DNA, 20 bp, synthetic construct
  source 1..20: mol_type = other DNA
cacttatctcttatggaaat

SEQ ID NO: 2963 - DNA, 20 bp, synthetic construct
  source 1..20: mol_type = other DNA
attttcacttatctcttatg

SEQ ID NO: 2964 - DNA, 20 bp, synthetic construct
  source 1..20: mol_type = other DNA
tctaaattttcacttatctc

SEQ ID NO: 2965 - DNA, 20 bp, synthetic construct
  source 1..20: mol_type = other DNA
tgacatctaaattttcactt

SEQ ID NO: 2966 - DNA, 20 bp, synthetic construct
  source 1..20: mol_type = other DNA
acaaatgacatctaaatttt

SEQ ID NO: 2967 - DNA, 20 bp, synthetic construct
  source 1..20: mol_type = other DNA
gggaaacaaatgacatctaa

SEQ ID NO: 2968 - DNA, 20 bp, synthetic construct
  source 1..20: mol_type = other DNA
acacaatatccatggacttg

SEQ ID NO: 2969 - DNA, 20 bp, synthetic construct
  source 1..20: mol_type = other DNA
ctgacacacaatatccatgg

SEQ ID NO: 2970 - DNA, 20 bp, synthetic construct
  source 1..20: mol_type = other DNA
atttccttacagggtattgg

SEQ ID NO: 2971 - DNA, 20 bp, synthetic construct
  source 1..20: mol_type = other DNA
ggccaagccccattcctaag

SEQ ID NO: 2972 - DNA, 20 bp, synthetic construct
  source 1..20: mol_type = other DNA
ttgctggccaagccccattc

SEQ ID NO: 2973 - DNA, 20 bp, synthetic construct
  source 1..20: mol_type = other DNA
gccacttgctggccaagccc

SEQ ID NO: 2974 - DNA, 20 bp, synthetic construct
  source 1..20: mol_type = other DNA
ggtgaagagcatggactctg

SEQ ID NO: 2975 - DNA, 20 bp, synthetic construct
  source 1..20: mol_type = other DNA
gcagggaaggcagcagtgtg

SEQ ID NO: 2976 - DNA, 20 bp, synthetic construct
  source 1..20: mol_type = other DNA
caatggcagggaaggcagca

SEQ ID NO: 2977 - DNA, 20 bp, synthetic construct
  source 1..20: mol_type = other DNA
acttgtgatacaaaattctg

SEQ ID NO: 2978 - DNA, 20 bp, synthetic construct
  source 1..20: mol_type = other DNA
aagacacttgtgatacaaaa

SEQ ID NO: 2979 - DNA, 20 bp, synthetic construct
  source 1..20: mol_type = other DNA
aagcttagaaggccctgctt

SEQ ID NO: 2980 - DNA, 20 bp, synthetic construct
  source 1..20: mol_type = other DNA
atgagaagcttagaaggccc

SEQ ID NO: 2981 - DNA, 20 bp, synthetic construct
  source 1..20: mol_type = other DNA
agctcatgagaagcttagaa

SEQ ID NO: 2982 - DNA, 20 bp, synthetic construct
  source 1..20: mol_type = other DNA
tgctgagctcatgagaagct

SEQ ID NO: 2983 - DNA, 20 bp, synthetic construct
  source 1..20: mol_type = other DNA
actgttgctgagctcatgag

SEQ ID NO: 2984 - DNA, 20 bp, synthetic construct
  source 1..20: mol_type = other DNA
aaaccactgttgctgagctc

SEQ ID NO: 2985 - DNA, 20 bp, synthetic construct
  source 1..20: mol_type = other DNA
agtaaaaaccactgttgctg

SEQ ID NO: 2986 - DNA, 20 bp, synthetic construct
  source 1..20: mol_type = other DNA
gctgcagtaaaaaccactgt

SEQ ID NO: 2987 - DNA, 20 bp, synthetic construct
  source 1..20: mol_type = other DNA
ctggttccatgctcttaggt

SEQ ID NO: 2988 - DNA, 20 bp, synthetic construct
  source 1..20: mol_type = other DNA
aggctctggttccatgctct

SEQ ID NO: 2989 - DNA, 20 bp, synthetic construct
  source 1..20: mol_type = other DNA
acaacaggctctggttccat

SEQ ID NO: 2990 - DNA, 20 bp, synthetic construct
  source 1..20: mol_type = other DNA
tctgaacaacaggctctggt

SEQ ID NO: 2991 - DNA, 20 bp, synthetic construct
  source 1..20: mol_type = other DNA
tgtcctctgaacaacaggct

SEQ ID NO: 2992 - DNA, 20 bp, synthetic construct
  source 1..20: mol_type = other DNA
atccttgtcctctgaacaac

SEQ ID NO: 2993 - DNA, 20 bp, synthetic construct
  source 1..20: mol_type = other DNA
gcctaatccttgtcctctga

SEQ ID NO: 2994 - DNA, 20 bp, synthetic construct
  source 1..20: mol_type = other DNA
tcagagcctaatccttgtcc

SEQ ID NO: 2995 - DNA, 20 bp, synthetic construct
  source 1..20: mol_type = other DNA
ctttctcagagcctaatcct

SEQ ID NO: 2996 - DNA, 20 bp, synthetic construct
  source 1..20: mol_type = other DNA
ccttcctttctcagagccta

SEQ ID NO: 2997 - DNA, 20 bp, synthetic construct
  source 1..20: mol_type = other DNA
aatgaccttcctttctcaga

SEQ ID NO: 2998 - DNA, 20 bp, synthetic construct
  source 1..20: mol_type = other DNA
caccaaatgaccttcctttc

SEQ ID NO: 2999 - DNA, 20 bp, synthetic construct
  source 1..20: mol_type = other DNA
aaatccaccaaatgaccttc

SEQ ID NO: 3000 - DNA, 20 bp, synthetic construct
  source 1..20: mol_type = other DNA
gaactaaatccaccaaatga

SEQ ID NO: 3001 - DNA, 20 bp, synthetic construct
  source 1..20: mol_type = other DNA
aggatgaactaaatccacca

SEQ ID NO: 3002 - DNA, 20 bp, synthetic construct
  source 1..20: mol_type = other DNA
gcaaaaggatgaactaaatc

SEQ ID NO: 3003 - DNA, 20 bp, synthetic construct
  source 1..20: mol_type = other DNA
gaagagcaaaaggatgaact

SEQ ID NO: 3004 - DNA, 20 bp, synthetic construct
  source 1..20: mol_type = other DNA
cacaggaagagcaaaaggat

SEQ ID NO: 3005 - DNA, 20 bp, synthetic construct
  source 1..20: mol_type = other DNA
ccaaacacaggaagagcaaa

SEQ ID NO: 3006 - DNA, 20 bp, synthetic construct
  source 1..20: mol_type = other DNA
agaaaccaaacacaggaaga

SEQ ID NO: 3007 - DNA, 20 bp, synthetic construct
  source 1..20: mol_type = other DNA
gccccagaaaccaaacacag

SEQ ID NO: 3008 - DNA, 20 bp, synthetic construct
  source 1..20: mol_type = other DNA
ctccagccccagaaaccaaa

SEQ ID NO: 3009 - DNA, 20 bp, synthetic construct
  source 1..20: mol_type = other DNA
aatctctccagccccagaaa

SEQ ID NO: 3010 - DNA, 20 bp, synthetic construct
  source 1..20: mol_type = other DNA
cctggcctttctcagctggg

SEQ ID NO: 3011 - DNA, 20 bp, synthetic construct
  source 1..20: mol_type = other DNA
tctagcctggcctttctcag

SEQ ID NO: 3012 - DNA, 20 bp, synthetic construct
  source 1..20: mol_type = other DNA
tgaattctagcctggccttt

SEQ ID NO: 3013 - DNA, 20 bp, synthetic construct
  source 1..20: mol_type = other DNA
gagactgaattctagcctgg

SEQ ID NO: 3014 - DNA, 20 bp, synthetic construct
  source 1..20: mol_type = other DNA
atccagagactgaattctag

SEQ ID NO: 3015 - DNA, 20 bp, synthetic construct
  source 1..20: mol_type = other DNA
agaagaagaggcctgatggg

SEQ ID NO: 3016 - DNA, 20 bp, synthetic construct
  source 1..20: mol_type = other DNA
gatggagaagaagaggcctg

SEQ ID NO: 3017 - DNA, 20 bp, synthetic construct
  source 1..20: mol_type = other DNA
gcctggatggagaagaagag

SEQ ID NO: 3018 - DNA, 20 bp, synthetic construct
  source 1..20: mol_type = other DNA
aggcagcctggatggagaag

SEQ ID NO: 3019 - DNA, 20 bp, synthetic construct
  source 1..20: mol_type = other DNA
tgctgaggcagcctggatgg

SEQ ID NO: 3020 - DNA, 20 bp, synthetic construct
  source 1..20: mol_type = other DNA
tctgctgctgaggcagcctg

SEQ ID NO: 3021 - DNA, 20 bp, synthetic construct
  source 1..20: mol_type = other DNA
cttactctgctgctgaggca

SEQ ID NO: 3022 - DNA, 20 bp, synthetic construct
  source 1..20: mol_type = other DNA
ttgtccttactctgctgctg

SEQ ID NO: 3023 - DNA, 20 bp, synthetic construct
  source 1..20: mol_type = other DNA
ggctggtctctctgggaagg

SEQ ID NO: 3024 - DNA, 20 bp, synthetic construct
  source 1..20: mol_type = other DNA
tagagggctggtctctctgg

SEQ ID NO: 3025 - DNA, 20 bp, synthetic construct
  source 1..20: mol_type = other DNA
ctgcttagagggctggtctc

SEQ ID NO: 3026 - DNA, 20 bp, synthetic construct
  source 1..20: mol_type = other DNA
ccccactgcttagagggctg

SEQ ID NO: 3027 - DNA, 20 bp, synthetic construct
  source 1..20: mol_type = other DNA
ccaggccccactgcttagag

SEQ ID NO: 3028 - DNA, 20 bp, synthetic construct
  source 1..20: mol_type = other DNA
gagctccaggccccactgct

SEQ ID NO: 3029 - DNA, 20 bp, synthetic construct
  source 1..20: mol_type = other DNA
ggaaacctagcttccagaaa

SEQ ID NO: 3030 - DNA, 20 bp, synthetic construct
  source 1..20: mol_type = other DNA
tttaggctatggtctgagca

SEQ ID NO: 3031 - DNA, 20 bp, synthetic construct
  source 1..20: mol_type = other DNA
tgaggtttaggctatggtct

SEQ ID NO: 3032 - DNA, 20 bp, synthetic construct
  source 1..20: mol_type = other DNA
gatgctccaggtgggccaga

SEQ ID NO: 3033 - DNA, 20 bp, synthetic construct
  source 1..20: mol_type = other DNA
aggtggatgctccaggtggg

SEQ ID NO: 3034 - DNA, 20 bp, synthetic construct
  source 1..20: mol_type = other DNA
cctctaggtggatgctccag

SEQ ID NO: 3035 - DNA, 20 bp, synthetic construct
  source 1..20: mol_type = other DNA
ggcatcctctaggtggatgc

SEQ ID NO: 3036 - DNA, 20 bp, synthetic construct
  source 1..20: mol_type = other DNA
ctagtggcatcctctaggtg

SEQ ID NO: 3037 - DNA, 20 bp, synthetic construct
  source 1..20: mol_type = other DNA
ctcctctagtggcatcctct

SEQ ID NO: 3038 - DNA, 20 bp, synthetic construct
  source 1..20: mol_type = other DNA
ccaggctcctctagtggcat

SEQ ID NO: 3039 - DNA, 20 bp, synthetic construct
  source 1..20: mol_type = other DNA
ggcatccaggctcctctagt

SEQ ID NO: 3040 - DNA, 20 bp, synthetic construct
  source 1..20: mol_type = other DNA
gactctagccccccagactc

SEQ ID NO: 3041 - DNA, 20 bp, synthetic construct
  source 1..20: mol_type = other DNA
tctgcctgattccctttctt

SEQ ID NO: 3042 - DNA, 20 bp, synthetic construct
  source 1..20: mol_type = other DNA
agcagtctgcctgattccct

SEQ ID NO: 3043 - DNA, 20 bp, synthetic construct
  source 1..20: mol_type = other DNA
tgttcagcagtctgcctgat

SEQ ID NO: 3044 - DNA, 20 bp, synthetic construct
  source 1..20: mol_type = other DNA
cttactgttcagcagtctgc

SEQ ID NO: 3045 - DNA, 20 bp, synthetic construct
  source 1..20: mol_type = other DNA
tcatacttactgttcagcag

SEQ ID NO: 3046 - DNA, 20 bp, synthetic construct
  source 1..20: mol_type = other DNA
caaagtcatacttactgttc

SEQ ID NO: 3047 - DNA, 20 bp, synthetic construct
  source 1..20: mol_type = other DNA
gcctacaaagtcatacttac

SEQ ID NO: 3048 - DNA, 20 bp, synthetic construct
  source 1..20: mol_type = other DNA
ggtgaatagctatgtctaaa

SEQ ID NO: 3049 - DNA, 20 bp, synthetic construct
  source 1..20: mol_type = other DNA
agcttggtgaatagctatgt

SEQ ID NO: 3050 - DNA, 20 bp, synthetic construct
  source 1..20: mol_type = other DNA
agcaaactgtgaaaagctta

SEQ ID NO: 3051 - DNA, 20 bp, synthetic construct
  source 1..20: mol_type = other DNA
ttaaaagcaaactgtgaaaa

SEQ ID NO: 3052 - DNA, 20 bp, synthetic construct
  source 1..20: mol_type = other DNA
gcctgttaaaagcaaactgt

SEQ ID NO: 3053 - DNA, 20 bp, synthetic construct
  source 1..20: mol_type = other DNA
caagagcctgttaaaagcaa

SEQ ID NO: 3054 - DNA, 20 bp, synthetic construct
  source 1..20: mol_type = other DNA
gcctacaagagcctgttaaa

SEQ ID NO: 3055 - DNA, 20 bp, synthetic construct
  source 1..20: mol_type = other DNA
gtgcagcctacaagagcctg

SEQ ID NO: 3056 - DNA, 20 bp, synthetic construct
  source 1..20: mol_type = other DNA
agcatgtgcagcctacaaga

SEQ ID NO: 3057 - DNA, 20 bp, synthetic construct
  source 1..20: mol_type = other DNA
agggaagcatgtgcagccta

SEQ ID NO: 3058 - DNA, 20 bp, synthetic construct
  source 1..20: mol_type = other DNA
tttctagggaagcatgtgca

SEQ ID NO: 3059 - DNA, 20 bp, synthetic construct
  source 1..20: mol_type = other DNA
acaagtttctagggaagcat

SEQ ID NO: 3060 - DNA, 20 bp, synthetic construct
  source 1..20: mol_type = other DNA
ggaagacaagtttctaggga

SEQ ID NO: 3061 - DNA, 20 bp, synthetic construct
  source 1..20: mol_type = other DNA
agaagggaagacaagtttct

SEQ ID NO: 3062 - DNA, 20 bp, synthetic construct
  source 1..20: mol_type = other DNA
atcgcagaagggaagacaag

SEQ ID NO: 3063 - DNA, 20 bp, synthetic construct
  source 1..20: mol_type = other DNA
agtgacgagatgtccaattt

SEQ ID NO: 3064 - DNA, 20 bp, synthetic construct
  source 1..20: mol_type = other DNA
acaactctcttgttgggagg

SEQ ID NO: 3065 - DNA, 20 bp, synthetic construct
  source 1..20: mol_type = other DNA
agggtacaactctcttgttg

SEQ ID NO: 3066 - DNA, 20 bp, synthetic construct
  source 1..20: mol_type = other DNA
aaaacagggtacaactctct

SEQ ID NO: 3067 - DNA, 20 bp, synthetic construct
  source 1..20: mol_type = other DNA
agctaaaaacagggtacaac

SEQ ID NO: 3068 - DNA, 20 bp, synthetic construct
  source 1..20: mol_type = other DNA
ccagggtagctaaaaacagg

SEQ ID NO: 3069 - DNA, 20 bp, synthetic construct
  source 1..20: mol_type = other DNA
tctccccagggtagctaaaa

SEQ ID NO: 3070 - DNA, 20 bp, synthetic construct
  source 1..20: mol_type = other DNA
cagcctctccccagggtagc

SEQ ID NO: 3071 - DNA, 20 bp, synthetic construct
  source 1..20: mol_type = other DNA
tagccctgttctagactcct

SEQ ID NO: 3072 - DNA, 20 bp, synthetic construct
  source 1..20: mol_type = other DNA
tagccccttgttgcccccca

SEQ ID NO: 3073 - DNA, 20 bp, synthetic construct
  source 1..20: mol_type = other DNA
aatggtagccccttgttgcc

SEQ ID NO: 3074 - DNA, 20 bp, synthetic construct
  source 1..20: mol_type = other DNA
agggaaatggtagccccttg

SEQ ID NO: 3075 - DNA, 20 bp, synthetic construct
  source 1..20: mol_type = other DNA
gtagactctccatgagccta

SEQ ID NO: 3076 - DNA, 20 bp, synthetic construct
  source 1..20: mol_type = other DNA
gggcccacaaaccctgagaa

SEQ ID NO: 3077 - DNA, 20 bp, synthetic construct
  source 1..20: mol_type = other DNA
aggcacacccagggccatgg

SEQ ID NO: 3078 - DNA, 20 bp, synthetic construct
  source 1..20: mol_type = other DNA
aagctaggcacacccagggc

SEQ ID NO: 3079 - DNA, 20 bp, synthetic construct
  source 1..20: mol_type = other DNA
gcactaagctaggcacaccc

SEQ ID NO: 3080 - DNA, 20 bp, synthetic construct
  source 1..20: mol_type = other DNA
ctgtggcactaagctaggca

SEQ ID NO: 3081 - DNA, 20 bp, synthetic construct
  source 1..20: mol_type = other DNA
gtttactgtggcactaagct

SEQ ID NO: 3082 - DNA, 20 bp, synthetic construct
  source 1..20: mol_type = other DNA
tgagtgtttactgtggcact

SEQ ID NO: 3083 - DNA, 20 bp, synthetic construct
  source 1..20: mol_type = other DNA
actgggcttcatctcccctc

SEQ ID NO: 3084 - DNA, 20 bp, synthetic construct
  source 1..20: mol_type = other DNA
gtcctactgggcttcatctc

SEQ ID NO: 3085 - DNA, 20 bp, synthetic construct
  source 1..20: mol_type = other DNA
ggcactgcaggccactcctg

SEQ ID NO: 3086 - DNA, 20 bp, synthetic construct
  source 1..20: mol_type = other DNA
aagggaggccttgcacttac

SEQ ID NO: 3087 - DNA, 20 bp, synthetic construct
  source 1..20: mol_type = other DNA
gcccttcagcttgtgcaggg

SEQ ID NO: 3088 - DNA, 20 bp, synthetic construct
  source 1..20: mol_type = other DNA
atgaggcccttcagcttgtg

SEQ ID NO: 3089 - DNA, 20 bp, synthetic construct
  source 1..20: mol_type = other DNA
tcaggatgaggcccttcagc

SEQ ID NO: 3090 - DNA, 20 bp, synthetic construct
  source 1..20: mol_type = other DNA
agcactcaggatgaggccct

SEQ ID NO: 3091 - DNA, 20 bp, synthetic construct
  source 1..20: mol_type = other DNA
acaaagtgggtgttaaaaga

SEQ ID NO: 3092 - DNA, 20 bp, synthetic construct
  source 1..20: mol_type = other DNA
ttttcacaaagtgggtgtta

SEQ ID NO: 3093 - DNA, 20 bp, synthetic construct
  source 1..20: mol_type = other DNA
gcttttaacctccccccaaa

SEQ ID NO: 3094 - DNA, 20 bp, synthetic construct
  source 1..20: mol_type = other DNA
cctcgactgagtgtgaactc

SEQ ID NO: 3095 - DNA, 20 bp, synthetic construct
  source 1..20: mol_type = other DNA
caaaccctcgactgagtgtg

SEQ ID NO: 3096 - DNA, 20 bp, synthetic construct
  source 1..20: mol_type = other DNA
ttatgcaaaccctcgactga

SEQ ID NO: 3097 - DNA, 20 bp, synthetic construct
  source 1..20: mol_type = other DNA
acatttgggcaaggcagaca

SEQ ID NO: 3098 - DNA, 20 bp, synthetic construct
  source 1..20: mol_type = other DNA
agggaataaaatacagagtt

SEQ ID NO: 3099 - DNA, 20 bp, synthetic construct
  source 1..20: mol_type = other DNA
cttccagggaataaaataca

SEQ ID NO: 3100 - DNA, 20 bp, synthetic construct
  source 1..20: mol_type = other DNA
gccaccttccagggaataaa

SEQ ID NO: 3101 - DNA, 20 bp, synthetic construct
  source 1..20: mol_type = other DNA
ctcctgccaccttccaggga

SEQ ID NO: 3102 - DNA, 20 bp, synthetic construct
  source 1..20: mol_type = other DNA
gtgacctcctgccaccttcc

SEQ ID NO: 3103 - DNA, 20 bp, synthetic construct
  source 1..20: mol_type = other DNA
tttacctggatgggaaagta

SEQ ID NO: 3104 - DNA, 20 bp, synthetic construct
  source 1..20: mol_type = other DNA
cagcactttacctggatggg

SEQ ID NO: 3105 - DNA, 20 bp, synthetic construct
  source 1..20: mol_type = other DNA
actcacagcactttacctgg

SEQ ID NO: 3106 - DNA, 20 bp, synthetic construct
  source 1..20: mol_type = other DNA
acaacactcacagcacttta

SEQ ID NO: 3107 - DNA, 20 bp, synthetic construct
  source 1..20: mol_type = other DNA
acttgcttccctgtgggtgg

SEQ ID NO: 3108 - DNA, 20 bp, synthetic construct
  source 1..20: mol_type = other DNA
tctaaacttgcttccctgtg

SEQ ID NO: 3109 - DNA, 20 bp, synthetic construct
  source 1..20: mol_type = other DNA
cttggtctaaacttgcttcc

SEQ ID NO: 3110 - DNA, 20 bp, synthetic construct
  source 1..20: mol_type = other DNA
accaacttggtctaaacttg

SEQ ID NO: 3111 - DNA, 20 bp, synthetic construct
  source 1..20: mol_type = other DNA
ggatactcagaagagcagtg

SEQ ID NO: 3112 - DNA, 20 bp, synthetic construct
  source 1..20: mol_type = other DNA
cctcagggctggcccaaaga

SEQ ID NO: 3113 - DNA, 20 bp, synthetic construct
  source 1..20: mol_type = other DNA
caggacctcagggctggccc

SEQ ID NO: 3114 - DNA, 20 bp, synthetic construct
  source 1..20: mol_type = other DNA
cctgtcaggacctcagggct

SEQ ID NO: 3115 - DNA, 20 bp, synthetic construct
  source 1..20: mol_type = other DNA
atttccctgtcaggacctca

SEQ ID NO: 3116 - DNA, 20 bp, synthetic construct
  source 1..20: mol_type = other DNA
tgaaagccaaactgagccac

SEQ ID NO: 3117 - DNA, 20 bp, synthetic construct
  source 1..20: mol_type = other DNA
agcttgcagaccaggcaggg

SEQ ID NO: 3118 - DNA, 20 bp, synthetic construct
  source 1..20: mol_type = other DNA
agcccagcttgcagaccagg

SEQ ID NO: 3119 - DNA, 20 bp, synthetic construct
  source 1..20: mol_type = other DNA
tcaccagcccagcttgcaga

SEQ ID NO: 3120 - DNA, 20 bp, synthetic construct
  source 1..20: mol_type = other DNA
gtgcctcaccagcccagctt

SEQ ID NO: 3121 - DNA, 20 bp, synthetic construct
  source 1..20: mol_type = other DNA
acatgcatcagggccagatg

SEQ ID NO: 3122 - DNA, 20 bp, synthetic construct
  source 1..20: mol_type = other DNA
agttatcctcaattcaccag

SEQ ID NO: 3123 - DNA, 20 bp, synthetic construct
  source 1..20: mol_type = other DNA
gccagagttatcctcaattc

SEQ ID NO: 3124 - DNA, 20 bp, synthetic construct
  source 1..20: mol_type = other DNA
atcctgccagagttatcctc

SEQ ID NO: 3125 - DNA, 20 bp, synthetic construct
  source 1..20: mol_type = other DNA
tcaggatcctgccagagtta

SEQ ID NO: 3126 - DNA, 20 bp, synthetic construct
  source 1..20: mol_type = other DNA
aaccttcaggatcctgccag

SEQ ID NO: 3127 - DNA, 20 bp, synthetic construct
  source 1..20: mol_type = other DNA
gggaaaaccttcaggatcct

SEQ ID NO: 3128 - DNA, 20 bp, synthetic construct
  source 1..20: mol_type = other DNA
acaggtctttcccctgtggg

SEQ ID NO: 3129 - DNA, 20 bp, synthetic construct
  source 1..20: mol_type = other DNA
gccagacaggtctttcccct

SEQ ID NO: 3130 - DNA, 20 bp, synthetic construct
  source 1..20: mol_type = other DNA
cttcagcacccctaccttct

SEQ ID NO: 3131 - DNA, 20 bp, synthetic construct
  source 1..20: mol_type = other DNA
ccactcttcagcacccctac

SEQ ID NO: 3132 - DNA, 20 bp, synthetic construct
  source 1..20: mol_type = other DNA
tgcctccactcttcagcacc

SEQ ID NO: 3133 - DNA, 20 bp, synthetic construct
  source 1..20: mol_type = other DNA
atatacaccaccctgcaccc

SEQ ID NO: 3134 - DNA, 20 bp, synthetic construct
  source 1..20: mol_type = other DNA
agcaaatatacaccaccctg

SEQ ID NO: 3135 - DNA, 20 bp, synthetic construct
  source 1..20: mol_type = other DNA
acaacagcaaatatacacca

SEQ ID NO: 3136 - DNA, 20 bp, synthetic construct
  source 1..20: mol_type = other DNA
gactcacaacagcaaatata

SEQ ID NO: 3137 - DNA, 20 bp, synthetic construct
  source 1..20: mol_type = other DNA
tcactgactcacaacagcaa

SEQ ID NO: 3138 - DNA, 20 bp, synthetic construct
  source 1..20: mol_type = other DNA
ctcagtcactgactcacaac

SEQ ID NO: 3139 - DNA, 20 bp, synthetic construct
  source 1..20: mol_type = other DNA
aggatctcagtcactgactc

SEQ ID NO: 3140 - DNA, 20 bp, synthetic construct
  source 1..20: mol_type = other DNA
cacaccaggatctcagtcac

SEQ ID NO: 3141 - DNA, 20 bp, synthetic construct
  source 1..20: mol_type = other DNA
ccagccactgcccccaggca

SEQ ID NO: 3142 - DNA, 20 bp, synthetic construct
  source 1..20: mol_type = other DNA
gttacccagccactgccccc

SEQ ID NO: 3143 - DNA, 20 bp, synthetic construct
  source 1..20: mol_type = other DNA
gcagggttacccagccactg

SEQ ID NO: 3144 - DNA, 20 bp, synthetic construct
  source 1..20: mol_type = other DNA
aggatgcagggttacccagc

SEQ ID NO: 3145 - DNA, 20 bp, synthetic construct
  source 1..20: mol_type = other DNA
agtgaaggatgcagggttac

SEQ ID NO: 3146 - DNA, 20 bp, synthetic construct
  source 1..20: mol_type = other DNA
aatgcagtgaaggatgcagg

SEQ ID NO: 3147 - DNA, 20 bp, synthetic construct
  source 1..20: mol_type = other DNA
aggagctggccctgccaccc

SEQ ID NO: 3148 - DNA, 20 bp, synthetic construct
  source 1..20: mol_type = other DNA
gcagaaggagctggccctgc

SEQ ID NO: 3149 - DNA, 20 bp, synthetic construct
  source 1..20: mol_type = other DNA
gatgagcagaaggagctggc

SEQ ID NO: 3150 - DNA, 20 bp, synthetic construct
  source 1..20: mol_type = other DNA
ctaaggatgagcagaaggag

SEQ ID NO: 3151 - DNA, 20 bp, synthetic construct
  source 1..20: mol_type = other DNA
ttaggctaaggatgagcaga

SEQ ID NO: 3152 - DNA, 20 bp, synthetic construct
  source 1..20: mol_type = other DNA
tgggcttaggctaaggatga

SEQ ID NO: 3153 - DNA, 20 bp, synthetic construct
  source 1..20: mol_type = other DNA
tcttcattacatgattactg

SEQ ID NO: 3154 - DNA, 20 bp, synthetic construct
  source 1..20: mol_type = other DNA
gcagatcttcattacatgat

SEQ ID NO: 3155 - DNA, 20 bp, synthetic construct
  source 1..20: mol_type = other DNA
accaggaagggagtaggtgg

SEQ ID NO: 3156 - DNA, 20 bp, synthetic construct
  source 1..20: mol_type = other DNA
gtcccaccaggaagggagta

SEQ ID NO: 3157 - DNA, 20 bp, synthetic construct
  source 1..20: mol_type = other DNA
ccagagtcccaccaggaagg

SEQ ID NO: 3158 - DNA, 20 bp, synthetic construct
  source 1..20: mol_type = other DNA
aaagaccagagtcccaccag

SEQ ID NO: 3159 - DNA, 20 bp, synthetic construct
  source 1..20: mol_type = other DNA
gggccagatgagctgttctg

SEQ ID NO: 3160 - DNA, 20 bp, synthetic construct
  source 1..20: mol_type = other DNA
gtgccaacagaagggataca

SEQ ID NO: 3161 - DNA, 20 bp, synthetic construct
  source 1..20: mol_type = other DNA
cacctgtgccaacagaaggg

SEQ ID NO: 3162 - DNA, 20 bp, synthetic construct
  source 1..20: mol_type = other DNA
aaccccacctgtgccaacag

SEQ ID NO: 3163 - DNA, 20 bp, synthetic construct
  source 1..20: mol_type = other DNA
ggctggtggtctcggtggct

SEQ ID NO: 3164 - DNA, 20 bp, synthetic construct
  source 1..20: mol_type = other DNA
caggtggctggtggtctcgg

SEQ ID NO: 3165 - DNA, 20 bp, synthetic construct
  source 1..20: mol_type = other DNA
tcttccaggtggctggtggt

SEQ ID NO: 3166 - DNA, 20 bp, synthetic construct
  source 1..20: mol_type = other DNA
gctcctcttccaggtggctg

SEQ ID NO: 3167 - DNA, 20 bp, synthetic construct
  source 1..20: mol_type = other DNA
tgtctgctcctcttccaggt

SEQ ID NO: 3168 - DNA, 20 bp, synthetic construct
  source 1..20: mol_type = other DNA
ggcactgtctgctcctcttc

SEQ ID NO: 3169 - DNA, 20 bp, synthetic construct
  source 1..20: mol_type = other DNA
ttcctagtctcctctccaag

SEQ ID NO: 3170 - DNA, 20 bp, synthetic construct
  source 1..20: mol_type = other DNA
attctaagcttagagagagt

SEQ ID NO: 3171 - DNA, 20 bp, synthetic construct
  source 1..20: mol_type = other DNA
aggtgattctaagcttagag

SEQ ID NO: 3172 - DNA, 20 bp, synthetic construct
  source 1..20: mol_type = other DNA
tggacaggtgattctaagct

SEQ ID NO: 3173 - DNA, 20 bp, synthetic construct
  source 1..20: mol_type = other DNA
gcagatggacaggtgattct

SEQ ID NO: 3174 - DNA, 20 bp, synthetic construct
  source 1..20: mol_type = other DNA
atgaggcagatggacaggtg

SEQ ID NO: 3175 - DNA, 20 bp, synthetic construct
  source 1..20: mol_type = other DNA
gtgaaatgaggcagatggac

SEQ ID NO: 3176 - DNA, 20 bp, synthetic construct
  source 1..20: mol_type = other DNA
tatcagtgaaatgaggcaga

SEQ ID NO: 3177 - DNA, 20 bp, synthetic construct
  source 1..20: mol_type = other DNA
aagcctatcagtgaaatgag

SEQ ID NO: 3178 - DNA, 20 bp, synthetic construct
  source 1..20: mol_type = other DNA
tcagtaagcctatcagtgaa

SEQ ID NO: 3179 - DNA, 20 bp, synthetic construct
  source 1..20: mol_type = other DNA
gtgcctcagtaagcctatca

SEQ ID NO: 3180 - DNA, 20 bp, synthetic construct
  source 1..20: mol_type = other DNA
tctctgtgcctcagtaagcc

SEQ ID NO: 3181 - DNA, 20 bp, synthetic construct
  source 1..20: mol_type = other DNA
tgaccttgggatagtccctc

SEQ ID NO: 3182 - DNA, 20 bp, synthetic construct
  source 1..20: mol_type = other DNA
ctttgtgaccttgggatagt

SEQ ID NO: 3183 - DNA, 20 bp, synthetic construct
  source 1..20: mol_type = other DNA
cttaagctttgtgaccttgg

SEQ ID NO: 3184 - DNA, 20 bp, synthetic construct
  source 1..20: mol_type = other DNA
tactacttaagctttgtgac

SEQ ID NO: 3185 - DNA, 20 bp, synthetic construct
  source 1..20: mol_type = other DNA
cctgctactacttaagcttt

SEQ ID NO: 3186 - DNA, 20 bp, synthetic construct
  source 1..20: mol_type = other DNA
ctagtcctgctactacttaa

SEQ ID NO: 3187 - DNA, 20 bp, synthetic construct
  source 1..20: mol_type = other DNA
ctacactagtcctgctacta

SEQ ID NO: 3188 - DNA, 20 bp, synthetic construct
  source 1..20: mol_type = other DNA
ggttcctacactagtcctgc

SEQ ID NO: 3189 - DNA, 20 bp, synthetic construct
  source 1..20: mol_type = other DNA
caggagtaagaccatgggcc

SEQ ID NO: 3190 - DNA, 20 bp, synthetic construct
  source 1..20: mol_type = other DNA
taacacaggagtaagaccat

SEQ ID NO: 3191 - DNA, 20 bp, synthetic construct
  source 1..20: mol_type = other DNA
gaaagtaacacaggagtaag

SEQ ID NO: 3192 - DNA, 20 bp, synthetic construct
  source 1..20: mol_type = other DNA
atggtgaaagtaacacagga

SEQ ID NO: 3193 - DNA, 20 bp, synthetic construct
  source 1..20: mol_type = other DNA
tgcttaagtttacacagcac

SEQ ID NO: 3194 - DNA, 20 bp, synthetic construct
  source 1..20: mol_type = other DNA
aggcttgcttaagtttacac

SEQ ID NO: 3195 - DNA, 20 bp, synthetic construct
  source 1..20: mol_type = other DNA
agcaaaggcttgcttaagtt

SEQ ID NO: 3196 - DNA, 20 bp, synthetic construct
  source 1..20: mol_type = other DNA
agaagagcaaaggcttgctt

SEQ ID NO: 3197 - DNA, 20 bp, synthetic construct
  source 1..20: mol_type = other DNA
cccacagaagagcaaaggct

SEQ ID NO: 3198 - DNA, 20 bp, synthetic construct
  source 1..20: mol_type = other DNA
tcagacccacagaagagcaa

SEQ ID NO: 3199 - DNA, 20 bp, synthetic construct
  source 1..20: mol_type = other DNA
agcagtgcatagaggaaaaa

SEQ ID NO: 3200 - DNA, 20 bp, synthetic construct
  source 1..20: mol_type = other DNA
accacagcagtgcatagagg

SEQ ID NO: 3201 - DNA, 20 bp, synthetic construct
  source 1..20: mol_type = other DNA
gtcccaccacagcagtgcat

SEQ ID NO: 3202 - DNA, 20 bp, synthetic construct
  source 1..20: mol_type = other DNA
ggcttgtcccaccacagcag

SEQ ID NO: 3203 - DNA, 20 bp, synthetic construct
  source 1..20: mol_type = other DNA
agataggcttgtcccaccac

SEQ ID NO: 3204 - DNA, 20 bp, synthetic construct
  source 1..20: mol_type = other DNA
tgctcagataggcttgtccc

SEQ ID NO: 3205 - DNA, 20 bp, synthetic construct
  source 1..20: mol_type = other DNA
caagtcactctttataccct

SEQ ID NO: 3206 - DNA, 20 bp, synthetic construct
  source 1..20: mol_type = other DNA
cctatcaagtcactctttat

SEQ ID NO: 3207 - DNA, 20 bp, synthetic construct
  source 1..20: mol_type = other DNA
acattcctatcaagtcactc

SEQ ID NO: 3208 - DNA, 20 bp, synthetic construct
  source 1..20: mol_type = other DNA
cccaacacgatgcccaggcc

SEQ ID NO: 3209 - DNA, 20 bp, synthetic construct
  source 1..20: mol_type = other DNA
tcctcttgctgcctgtttcc

SEQ ID NO: 3210 - DNA, 20 bp, synthetic construct
  source 1..20: mol_type = other DNA
ttgtgtcctcttgctgcctg

SEQ ID NO: 3211 - DNA, 20 bp, synthetic construct
  source 1..20: mol_type = other DNA
tgctcttgtgtcctcttgct

SEQ ID NO: 3212 - DNA, 20 bp, synthetic construct
  source 1..20: mol_type = other DNA
aaggataccgccaatgaagg

SEQ ID NO: 3213 - DNA, 20 bp, synthetic construct
  source 1..20: mol_type = other DNA
tcatgtcacactcccctccc

SEQ ID NO: 3214 - DNA, 20 bp, synthetic construct
  source 1..20: mol_type = other DNA
catctgaccagctctgatct

SEQ ID NO: 3215 - DNA, 20 bp, synthetic construct
  source 1..20: mol_type = other DNA
gtaggcatctgaccagctct

SEQ ID NO: 3216 - DNA, 20 bp, synthetic construct
  source 1..20: mol_type = other DNA
agaatgtaggcatctgacca

SEQ ID NO: 3217 - DNA, 20 bp, synthetic construct
  source 1..20: mol_type = other DNA
tgcccttgctgtaggaccca

SEQ ID NO: 3218 - DNA, 20 bp, synthetic construct
  source 1..20: mol_type = other DNA
gtcaatgcccttgctgtagg

SEQ ID NO: 3219 - DNA, 20 bp, synthetic construct
  source 1..20: mol_type = other DNA
tgcaagtcaatgcccttgct

SEQ ID NO: 3220 - DNA, 20 bp, synthetic construct
  source 1..20: mol_type = other DNA
cacagtgcaagtcaatgccc

SEQ ID NO: 3221 - DNA, 20 bp, synthetic construct
  source 1..20: mol_type = other DNA
tgggacacagtgcaagtcaa

SEQ ID NO: 3222 - DNA, 20 bp, synthetic construct
  source 1..20: mol_type = other DNA
aggctctgatgggacatttg

SEQ ID NO: 3223 - DNA, 20 bp, synthetic construct
  source 1..20: mol_type = other DNA
caggtggctctttaaatcat

SEQ ID NO: 3224 - DNA, 20 bp, synthetic construct
  source 1..20: mol_type = other DNA
ggccccaggtggctctttaa

SEQ ID NO: 3225 - DNA, 20 bp, synthetic construct
  source 1..20: mol_type = other DNA
ccagtgggccccaggtggct

SEQ ID NO: 3226 - DNA, 20 bp, synthetic construct
  source 1..20: mol_type = other DNA
gtcacccagtgggccccagg

SEQ ID NO: 3227 - DNA, 20 bp, synthetic construct
  source 1..20: mol_type = other DNA
cctgggctgctggatgaaga

SEQ ID NO: 3228 - DNA, 20 bp, synthetic construct
  source 1..20: mol_type = other DNA
ttttccctgggctgctggat

SEQ ID NO: 3229 - DNA, 20 bp, synthetic construct
  source 1..20: mol_type = other DNA
tgcacttttccctgggctgc

SEQ ID NO: 3230 - DNA, 20 bp, synthetic construct
  source 1..20: mol_type = other DNA
tcacagcaaattatcctgca

SEQ ID NO: 3231 - DNA, 20 bp, synthetic construct
  source 1..20: mol_type = other DNA
ggaggtcacagcaaattatc

SEQ ID NO: 3232 - DNA, 20 bp, synthetic construct
  source 1..20: mol_type = other DNA
cctgtggaggtcacagcaaa

SEQ ID NO: 3233 - DNA, 20 bp, synthetic construct
  source 1..20: mol_type = other DNA
taagccattccttggatgac

SEQ ID NO: 3234 - DNA, 20 bp, synthetic construct
  source 1..20: mol_type = other DNA
aggtctaagccattccttgg

SEQ ID NO: 3235 - DNA, 20 bp, synthetic construct
  source 1..20: mol_type = other DNA
ctgaaaggtctaagccattc

SEQ ID NO: 3236 - DNA, 20 bp, synthetic construct
  source 1..20: mol_type = other DNA
tttgtccccttcctatggct

SEQ ID NO: 3237 - DNA, 20 bp, synthetic construct
  source 1..20: mol_type = other DNA
caggcctgggatagttaccc

SEQ ID NO: 3238 - DNA, 20 bp, synthetic construct
  source 1..20: mol_type = other DNA
atggccaggcctgggatagt

SEQ ID NO: 3239 - DNA, 20 bp, synthetic construct
  source 1..20: mol_type = other DNA
agctgatggccaggcctggg

SEQ ID NO: 3240 - DNA, 20 bp, synthetic construct
  source 1..20: mol_type = other DNA
tcctgagctgatggccaggc

SEQ ID NO: 3241 - DNA, 20 bp, synthetic construct
  source 1..20: mol_type = other DNA
cttgctcctgagctgatggc

SEQ ID NO: 3242 - DNA, 20 bp, synthetic construct
  source 1..20: mol_type = other DNA
ggaaacttgctcctgagctg

SEQ ID NO: 3243 - DNA, 20 bp, synthetic construct
  source 1..20: mol_type = other DNA
aacttggaaacttgctcctg

SEQ ID NO: 3244 - DNA, 20 bp, synthetic construct
  source 1..20: mol_type = other DNA
tgggaaacttggaaacttgc

SEQ ID NO: 3245 - DNA, 20 bp, synthetic construct
  source 1..20: mol_type = other DNA
ggcattgagggaagagctgg

SEQ ID NO: 3246 - DNA, 20 bp, synthetic construct
  source 1..20: mol_type = other DNA
aggcaggcattgagggaaga

SEQ ID NO: 3247 - DNA, 20 bp, synthetic construct
  source 1..20: mol_type = other DNA
aaggcaggcaggcattgagg

SEQ ID NO: 3248 - DNA, 20 bp, synthetic construct
  source 1..20: mol_type = other DNA
tgaaaaaggcaggcaggcat

SEQ ID NO: 3249 - DNA, 20 bp, synthetic construct
  source 1..20: mol_type = other DNA
tttgatgaaaaaggcaggca

SEQ ID NO: 3250 - DNA, 20 bp, synthetic construct
  source 1..20: mol_type = other DNA
ctagttttgatgaaaaaggc

SEQ ID NO: 3251 - DNA, 20 bp, synthetic construct
  source 1..20: mol_type = other DNA
ttgtgctagttttgatgaaa

SEQ ID NO: 3252 - DNA, 20 bp, synthetic construct
  source 1..20: mol_type = other DNA
tagctctcagtgaagctgga

SEQ ID NO: 3253 - DNA, 20 bp, synthetic construct
  source 1..20: mol_type = other DNA
gagcagatctcaaaatctcg

SEQ ID NO: 3254 - DNA, 20 bp, synthetic construct
  source 1..20: mol_type = other DNA
acagcagcagtctaatccat

SEQ ID NO: 3255 - DNA, 20 bp, synthetic construct
  source 1..20: mol_type = other DNA
gggaaacagcagcagtctaa

SEQ ID NO: 3256 - DNA, 20 bp, synthetic construct
  source 1..20: mol_type = other DNA
taaatgggaaacagcagcag

SEQ ID NO: 3257 - DNA, 20 bp, synthetic construct
  source 1..20: mol_type = other DNA
ccaaataaatgggaaacagc

SEQ ID NO: 3258 - DNA, 20 bp, synthetic construct
  source 1..20: mol_type = other DNA
actccccaaataaatgggaa

SEQ ID NO: 3259 - DNA, 20 bp, synthetic construct
  source 1..20: mol_type = other DNA
cagctactccccaaataaat

SEQ ID NO: 3260 - DNA, 20 bp, synthetic construct
  source 1..20: mol_type = other DNA
actctcagctactccccaaa

SEQ ID NO: 3261 - DNA, 20 bp, synthetic construct
  source 1..20: mol_type = other DNA
aaccaactctcagctactcc

SEQ ID NO: 3262 - DNA, 20 bp, synthetic construct
  source 1..20: mol_type = other DNA
caaacagattaaagttgctc

SEQ ID NO: 3263 - DNA, 20 bp, synthetic construct
  source 1..20: mol_type = other DNA
aatgtgagcaagactccctc

SEQ ID NO: 3264 - DNA, 20 bp, synthetic construct
  source 1..20: mol_type = other DNA
ttgggagcctcctggcagag

SEQ ID NO: 3265 - DNA, 20 bp, synthetic construct
  source 1..20: mol_type = other DNA
gcccaggttttctgtgactc

SEQ ID NO: 3266 - DNA, 20 bp, synthetic construct
  source 1..20: mol_type = other DNA
caagagcccaggttttctgt

SEQ ID NO: 3267 - DNA, 20 bp, synthetic construct
  source 1..20: mol_type = other DNA
gtcactggccaccagcagaa

SEQ ID NO: 3268 - DNA, 20 bp, synthetic construct
  source 1..20: mol_type = other DNA
gcagagtcactggccaccag

SEQ ID NO: 3269 - DNA, 20 bp, synthetic construct
  source 1..20: mol_type = other DNA
tggaagcagagtcactggcc

SEQ ID NO: 3270 - DNA, 20 bp, synthetic construct
  source 1..20: mol_type = other DNA
tgcaaagtgccccttccctg

SEQ ID NO: 3271 - DNA, 20 bp, synthetic construct
  source 1..20: mol_type = other DNA
agtgctgcaaagtgcccctt

SEQ ID NO: 3272 - DNA, 20 bp, synthetic construct
  source 1..20: mol_type = other DNA
acctgagtgctgcaaagtgc

SEQ ID NO: 3273 - DNA, 20 bp, synthetic construct
  source 1..20: mol_type = other DNA
ctcccacctgagtgctgcaa

SEQ ID NO: 3274 - DNA, 20 bp, synthetic construct
  source 1..20: mol_type = other DNA
tgacactcccacctgagtgc

SEQ ID NO: 3275 - DNA, 20 bp, synthetic construct
  source 1..20: mol_type = other DNA
atcaatgacactcccacctg

SEQ ID NO: 3276 - DNA, 20 bp, synthetic construct
  source 1..20: mol_type = other DNA
ttttggctgccctgcctcaa

SEQ ID NO: 3277 - DNA, 20 bp, synthetic construct
  source 1..20: mol_type = other DNA
ggtctttttggctgccctgc

SEQ ID NO: 3278 - DNA, 20 bp, synthetic construct
  source 1..20: mol_type = other DNA
gataacaaggaatgaacacg

SEQ ID NO: 3279 - DNA, 20 bp, synthetic construct
  source 1..20: mol_type = other DNA
tcctggataacaaggaatga

SEQ ID NO: 3280 - DNA, 20 bp, synthetic construct
  source 1..20: mol_type = other DNA
tacaattcctggataacaag

SEQ ID NO: 3281 - DNA, 20 bp, synthetic construct
  source 1..20: mol_type = other DNA
agaaatacaattcctggata

SEQ ID NO: 3282 - DNA, 20 bp, synthetic construct
  source 1..20: mol_type = other DNA
cttctagaaatacaattcct

SEQ ID NO: 3283 - DNA, 20 bp, synthetic construct
  source 1..20: mol_type = other DNA
acaaacttctagaaatacaa

SEQ ID NO: 3284 - DNA, 20 bp, synthetic construct
  source 1..20: mol_type = other DNA
gtgaaacaaacttctagaaa

SEQ ID NO: 3285 - DNA, 20 bp, synthetic construct
  source 1..20: mol_type = other DNA
tttgtccacatatctgattg

SEQ ID NO: 3286 - DNA, 20 bp, synthetic construct
  source 1..20: mol_type = other DNA
ttatctttgtccacatatct

SEQ ID NO: 3287 - DNA, 20 bp, synthetic construct
  source 1..20: mol_type = other DNA
ataccttatctttgtccaca

SEQ ID NO: 3288 - DNA, 20 bp, synthetic construct
  source 1..20: mol_type = other DNA
aataaataccttatctttgt

SEQ ID NO: 3289 - DNA, 20 bp, synthetic construct
  source 1..20: mol_type = other DNA
gcttcaataaataccttatc

SEQ ID NO: 3290 - DNA, 20 bp, synthetic construct
  source 1..20: mol_type = other DNA
gtaatgcttcaataaatacc

SEQ ID NO: 3291 - DNA, 20 bp, synthetic construct
  source 1..20: mol_type = other DNA
tagaagtaatgcttcaataa

SEQ ID NO: 3292 - DNA, 20 bp, synthetic construct
  source 1..20: mol_type = other DNA
cctcttagaagtaatgcttc

SEQ ID NO: 3293 - DNA, 20 bp, synthetic construct
  source 1..20: mol_type = other DNA
atttccctcttagaagtaat

SEQ ID NO: 3294 - DNA, 20 bp, synthetic construct
  source 1..20: mol_type = other DNA
ccaaaatttccctcttagaa

SEQ ID NO: 3295 - DNA, 20 bp, synthetic construct
  source 1..20: mol_type = other DNA
tattctacagcacagctctc

SEQ ID NO: 3296 - DNA, 20 bp, synthetic construct
  source 1..20: mol_type = other DNA
tcaaaatccctcagttccat

SEQ ID NO: 3297 - DNA, 20 bp, synthetic construct
  source 1..20: mol_type = other DNA
ccttatcaaaatccctcagt

SEQ ID NO: 3298 - DNA, 20 bp, synthetic construct
  source 1..20: mol_type = other DNA
tctgtccttatcaaaatccc

SEQ ID NO: 3299 - DNA, 20 bp, synthetic construct
  source 1..20: mol_type = other DNA
agctatctgtccttatcaaa

SEQ ID NO: 3300 - DNA, 20 bp, synthetic construct
  source 1..20: mol_type = other DNA
atcatttttatatcattttc

SEQ ID NO: 3301 - DNA, 20 bp, synthetic construct
  source 1..20: mol_type = other DNA
ttgatatcatttttatatca

SEQ ID NO: 3302 - DNA, 20 bp, synthetic construct
  source 1..20: mol_type = other DNA
atgggttgatatcattttta

SEQ ID NO: 3303 - DNA, 20 bp, synthetic construct
  source 1..20: mol_type = other DNA
gttatatgggttgatatcat

SEQ ID NO: 3304 - DNA, 20 bp, synthetic construct
  source 1..20: mol_type = other DNA
ttgaggttatatgggttgat

SEQ ID NO: 3305 - DNA, 20 bp, synthetic construct
  source 1..20: mol_type = other DNA
caaaattgaggttatatggg

SEQ ID NO: 3306 - DNA, 20 bp, synthetic construct
  source 1..20: mol_type = other DNA
atacatgctctttttcaaaa

SEQ ID NO: 3307 - DNA, 20 bp, synthetic construct
  source 1..20: mol_type = other DNA
catctcccaatgcaggccca

SEQ ID NO: 3308 - DNA, 20 bp, synthetic construct
  source 1..20: mol_type = other DNA
gccctgacccaccatgtctg

SEQ ID NO: 3309 - DNA, 20 bp, synthetic construct
  source 1..20: mol_type = other DNA
cctcagccctgacccaccat

SEQ ID NO: 3310 - DNA, 20 bp, synthetic construct
  source 1..20: mol_type = other DNA
ctcctcctcagccctgaccc

SEQ ID NO: 3311 - DNA, 20 bp, synthetic construct
  source 1..20: mol_type = other DNA
cagctctcctcctcagccct

SEQ ID NO: 3312 - DNA, 20 bp, synthetic construct
  source 1..20: mol_type = other DNA
atggacagctctcctcctca

SEQ ID NO: 3313 - DNA, 20 bp, synthetic construct
  source 1..20: mol_type = other DNA
accatatggacagctctcct

SEQ ID NO: 3314 - DNA, 20 bp, synthetic construct
  source 1..20: mol_type = other DNA
gtgccatggacaacaatcag

SEQ ID NO: 3315 - DNA, 20 bp, synthetic construct
  source 1..20: mol_type = other DNA
ttacagtgccatggacaaca

SEQ ID NO: 3316 - DNA, 20 bp, synthetic construct
  source 1..20: mol_type = other DNA
gacaattacagtgccatgga

SEQ ID NO: 3317 - DNA, 20 bp, synthetic construct
  source 1..20: mol_type = other DNA
aatgcatcagtctggtggga

SEQ ID NO: 3318 - DNA, 20 bp, synthetic construct
  source 1..20: mol_type = other DNA
atcccaatgcatcagtctgg

SEQ ID NO: 3319 - DNA, 20 bp, synthetic construct
  source 1..20: mol_type = other DNA
tgcatttggcaaacattccc

SEQ ID NO: 3320 - DNA, 20 bp, synthetic construct
  source 1..20: mol_type = other DNA
actcatgcatttggcaaaca

SEQ ID NO: 3321 - DNA, 20 bp, synthetic construct
  source 1..20: mol_type = other DNA
tgggaactcatgcatttggc

SEQ ID NO: 3322 - DNA, 20 bp, synthetic construct
  source 1..20: mol_type = other DNA
tgttttgggaactcatgcat

SEQ ID NO: 3323 - DNA, 20 bp, synthetic construct
  source 1..20: mol_type = other DNA
aaggttgttttgggaactca

SEQ ID NO: 3324 - DNA, 20 bp, synthetic construct
  source 1..20: mol_type = other DNA
gatacaaggttgttttggga

SEQ ID NO: 3325 - DNA, 20 bp, synthetic construct
  source 1..20: mol_type = other DNA
ctaatgatacaaggttgttt

SEQ ID NO: 3326 - DNA, 20 bp, synthetic construct
  source 1..20: mol_type = other DNA
tgcagctaatgatacaaggt

SEQ ID NO: 3327 - DNA, 20 bp, synthetic construct
  source 1..20: mol_type = other DNA
taaaatgcagctaatgatac

SEQ ID NO: 3328 - DNA, 20 bp, synthetic construct
  source 1..20: mol_type = other DNA
atctgtaaaatgcagctaat

SEQ ID NO: 3329 - DNA, 20 bp, synthetic construct
  source 1..20: mol_type = other DNA
tcctcatctgtaaaatgcag

SEQ ID NO: 3330 - DNA, 20 bp, synthetic construct
  source 1..20: mol_type = other DNA
cagtttcctcatctgtaaaa

SEQ ID NO: 3331 - DNA, 20 bp, synthetic construct
  source 1..20: mol_type = other DNA
agcctcagtttcctcatctg

SEQ ID NO: 3332 - DNA, 20 bp, synthetic construct
  source 1..20: mol_type = other DNA
ttctgagcctcagtttcctc

SEQ ID NO: 3333 - DNA, 20 bp, synthetic construct
  source 1..20: mol_type = other DNA
catttttctgagcctcagtt

SEQ ID NO: 3334 - DNA, 20 bp, synthetic construct
  source 1..20: mol_type = other DNA
ctattcatttttctgagcct

SEQ ID NO: 3335 - DNA, 20 bp, synthetic construct
  source 1..20: mol_type = other DNA
gtaagctattcatttttctg

SEQ ID NO: 3336 - DNA, 20 bp, synthetic construct
  source 1..20: mol_type = other DNA
tctgtgtaagctattcattt

SEQ ID NO: 3337 - DNA, 20 bp, synthetic construct
  source 1..20: mol_type = other DNA
ctggttctgtgtaagctatt

SEQ ID NO: 3338 - DNA, 20 bp, synthetic construct
  source 1..20: mol_type = other DNA
gttgtctggttctgtgtaag

SEQ ID NO: 3339 - DNA, 20 bp, synthetic construct
  source 1..20: mol_type = other DNA
ttggagttgtctggttctgt

SEQ ID NO: 3340 - DNA, 20 bp, synthetic construct
  source 1..20: mol_type = other DNA
tggatccactccccatcccc

SEQ ID NO: 3341 - DNA, 20 bp, synthetic construct
  source 1..20: mol_type = other DNA
gcccatggatccactcccca

SEQ ID NO: 3342 - DNA, 20 bp, synthetic construct
  source 1..20: mol_type = other DNA
gggttgcccatggatccact

SEQ ID NO: 3343 - DNA, 20 bp, synthetic construct
  source 1..20: mol_type = other DNA
agtcagggttgcccatggat

SEQ ID NO: 3344 - DNA, 20 bp, synthetic construct
  source 1..20: mol_type = other DNA
ccaaggagtctgctgccctg

SEQ ID NO: 3345 - DNA, 20 bp, synthetic construct
  source 1..20: mol_type = other DNA
gtctgggtcctgtcttcagg

SEQ ID NO: 3346 - DNA, 20 bp, synthetic construct
  source 1..20: mol_type = other DNA
cagaatgactgactcccttc

SEQ ID NO: 3347 - DNA, 20 bp, synthetic construct
  source 1..20: mol_type = other DNA
gcagtctgggctccaacatc

SEQ ID NO: 3348 - DNA, 20 bp, synthetic construct
  source 1..20: mol_type = other DNA
actgtgcagtctgggctcca

SEQ ID NO: 3349 - DNA, 20 bp, synthetic construct
  source 1..20: mol_type = other DNA
cccacactgtgcagtctggg

SEQ ID NO: 3350 - DNA, 20 bp, synthetic construct
  source 1..20: mol_type = other DNA
cttggcccacactgtgcagt

SEQ ID NO: 3351 - DNA, 20 bp, synthetic construct
  source 1..20: mol_type = other DNA
gcaaacttggcccacactgt

SEQ ID NO: 3352 - DNA, 20 bp, synthetic construct
  source 1..20: mol_type = other DNA
catgggcaaacttggcccac

SEQ ID NO: 3353 - DNA, 20 bp, synthetic construct
  source 1..20: mol_type = other DNA
acacacatgggcaaacttgg

SEQ ID NO: 3354 - DNA, 20 bp, synthetic construct
  source 1..20: mol_type = other DNA
cccagacacacatgggcaaa

SEQ ID NO: 3355 - DNA, 20 bp, synthetic construct
  source 1..20: mol_type = other DNA
gcccacccagacacacatgg

SEQ ID NO: 3356 - DNA, 20 bp, synthetic construct
  source 1..20: mol_type = other DNA
tctgtgcccacccagacaca

SEQ ID NO: 3357 - DNA, 20 bp, synthetic construct
  source 1..20: mol_type = other DNA
ttgcatctgtgcccacccag

SEQ ID NO: 3358 - DNA, 20 bp, synthetic construct
  source 1..20: mol_type = other DNA
acaggttgcatctgtgccca

SEQ ID NO: 3359 - DNA, 20 bp, synthetic construct
  source 1..20: mol_type = other DNA
ggccccaggtggtccagtcc

SEQ ID NO: 3360 - DNA, 20 bp, synthetic construct
  source 1..20: mol_type = other DNA
attctggccccaggtggtcc

SEQ ID NO: 3361 - DNA, 20 bp, synthetic construct
  source 1..20: mol_type = other DNA
tggtctcccagcaaaatgat

SEQ ID NO: 3362 - DNA, 20 bp, synthetic construct
  source 1..20: mol_type = other DNA
cctcctggtctcccagcaaa

SEQ ID NO: 3363 - DNA, 20 bp, synthetic construct
  source 1..20: mol_type = other DNA
cctgacctcctggtctccca

SEQ ID NO: 3364 - DNA, 20 bp, synthetic construct
  source 1..20: mol_type = other DNA
tccttcctgacctcctggtc

SEQ ID NO: 3365 - DNA, 20 bp, synthetic construct
  source 1..20: mol_type = other DNA
caccctccttcctgacctcc

SEQ ID NO: 3366 - DNA, 20 bp, synthetic construct
  source 1..20: mol_type = other DNA
ttccaaagcctgaggtaagg

SEQ ID NO: 3367 - DNA, 20 bp, synthetic construct
  source 1..20: mol_type = other DNA
tcttcttccaaagcctgagg

SEQ ID NO: 3368 - DNA, 20 bp, synthetic construct
  source 1..20: mol_type = other DNA
cagcctcttcttccaaagcc

SEQ ID NO: 3369 - DNA, 20 bp, synthetic construct
  source 1..20: mol_type = other DNA
ctggcccagggctgagcctg

SEQ ID NO: 3370 - DNA, 20 bp, synthetic construct
  source 1..20: mol_type = other DNA
tccctgaaggcagggactgg

SEQ ID NO: 3371 - DNA, 20 bp, synthetic construct
  source 1..20: mol_type = other DNA
ggtgctccctgaaggcaggg

SEQ ID NO: 3372 - DNA, 20 bp, synthetic construct
  source 1..20: mol_type = other DNA
cccttggtgctccctgaagg

SEQ ID NO: 3373 - DNA, 20 bp, synthetic construct
  source 1..20: mol_type = other DNA
cacactgtgttgtcactgtc

SEQ ID NO: 3374 - DNA, 20 bp, synthetic construct
  source 1..20: mol_type = other DNA
ctcagcacactgtgttgtca

SEQ ID NO: 3375 - DNA, 20 bp, synthetic construct
  source 1..20: mol_type = other DNA
acagtctcagcacactgtgt

SEQ ID NO: 3376 - DNA, 20 bp, synthetic construct
  source 1..20: mol_type = other DNA
agccctggactcaccattgt

SEQ ID NO: 3377 - DNA, 20 bp, synthetic construct
  source 1..20: mol_type = other DNA
ctctcagccctggactcacc

SEQ ID NO: 3378 - DNA, 20 bp, synthetic construct
  source 1..20: mol_type = other DNA
gcctctgccaggaagttctc

SEQ ID NO: 3379 - DNA, 20 bp, synthetic construct
  source 1..20: mol_type = other DNA
ggcctgcctctgccaggaag

SEQ ID NO: 3380 - DNA, 20 bp, synthetic construct
  source 1..20: mol_type = other DNA
tgcagggcctgcctctgcca

SEQ ID NO: 3381 - DNA, 20 bp, synthetic construct
  source 1..20: mol_type = other DNA
gaatgcctgttttccacctc

SEQ ID NO: 3382 - DNA, 20 bp, synthetic construct
  source 1..20: mol_type = other DNA
ctctggaatgcctgttttcc

SEQ ID NO: 3383 - DNA, 20 bp, synthetic construct
  source 1..20: mol_type = other DNA
aggcaaagggaaggctgagc

SEQ ID NO: 3384 - DNA, 20 bp, synthetic construct
  source 1..20: mol_type = other DNA
cccccaggcaaagggaaggc

SEQ ID NO: 3385 - DNA, 20 bp, synthetic construct
  source 1..20: mol_type = other DNA
gccttctgccccactgctag

SEQ ID NO: 3386 - DNA, 20 bp, synthetic construct
  source 1..20: mol_type = other DNA
gatgggccttctgccccact

SEQ ID NO: 3387 - DNA, 20 bp, synthetic construct
  source 1..20: mol_type = other DNA
gttctgatgggccttctgcc

SEQ ID NO: 3388 - DNA, 20 bp, synthetic construct
  source 1..20: mol_type = other DNA
accaggttctgatgggcctt

SEQ ID NO: 3389 - DNA, 20 bp, synthetic construct
  source 1..20: mol_type = other DNA
tctctaccaggttctgatgg

SEQ ID NO: 3390 - DNA, 20 bp, synthetic construct
  source 1..20: mol_type = other DNA
ggccctggacactggccaag

SEQ ID NO: 3391 - DNA, 20 bp, synthetic construct
  source 1..20: mol_type = other DNA
ctagaggccctggacactgg

SEQ ID NO: 3392 - DNA, 20 bp, synthetic construct
  source 1..20: mol_type = other DNA
gtcagcctagaggccctgga

SEQ ID NO: 3393 - DNA, 20 bp, synthetic construct
  source 1..20: mol_type = other DNA
ccagggtctgtcatacccta

SEQ ID NO: 3394 - DNA, 20 bp, synthetic construct
  source 1..20: mol_type = other DNA
agaggccagggtctgtcata

SEQ ID NO: 3395 - DNA, 20 bp, synthetic construct
  source 1..20: mol_type = other DNA
tctggaagggagaggccagg

SEQ ID NO: 3396 - DNA, 20 bp, synthetic construct
  source 1..20: mol_type = other DNA
accaacagtggtgatgggct

SEQ ID NO: 3397 - DNA, 20 bp, synthetic construct
  source 1..20: mol_type = other DNA
ggcttaccaacagtggtgat

SEQ ID NO: 3398 - DNA, 20 bp, synthetic construct
  source 1..20: mol_type = other DNA
gttcaggacagcccttggtc

SEQ ID NO: 3399 - DNA, 20 bp, synthetic construct
  source 1..20: mol_type = other DNA
cctgtgttcaggacagccct

SEQ ID NO: 3400 - DNA, 20 bp, synthetic construct
  source 1..20: mol_type = other DNA
ggcaccctgtgttcaggaca

SEQ ID NO: 3401 - DNA, 20 bp, synthetic construct
  source 1..20: mol_type = other DNA
aatcccgtctctactgctga

SEQ ID NO: 3402 - DNA, 20 bp, synthetic construct
  source 1..20: mol_type = other DNA
tcagagccaggtggcctgca

SEQ ID NO: 3403 - DNA, 20 bp, synthetic construct
  source 1..20: mol_type = other DNA
ggccatcagagccaggtggc

SEQ ID NO: 3404 - DNA, 20 bp, synthetic construct
  source 1..20: mol_type = other DNA
ggcatggccatcagagccag

SEQ ID NO: 3405 - DNA, 20 bp, synthetic construct
  source 1..20: mol_type = other DNA
ctaagggcatggccatcaga

SEQ ID NO: 3406 - DNA, 20 bp, synthetic construct
  source 1..20: mol_type = other DNA
catggctaagggcatggcca

SEQ ID NO: 3407 - DNA, 20 bp, synthetic construct
  source 1..20: mol_type = other DNA
gtcctcatggctaagggcat

SEQ ID NO: 3408 - DNA, 20 bp, synthetic construct
  source 1..20: mol_type = other DNA
tcaaagtcctcatggctaag

SEQ ID NO: 3409 - DNA, 20 bp, synthetic construct
  source 1..20: mol_type = other DNA
acacttcaaagtcctcatgg

SEQ ID NO: 3410 - DNA, 20 bp, synthetic construct
  source 1..20: mol_type = other DNA
acccaacacttcaaagtcct

SEQ ID NO: 3411 - DNA, 20 bp, synthetic construct
  source 1..20: mol_type = other DNA
tcagcacccaacacttcaaa

SEQ ID NO: 3412 - DNA, 20 bp, synthetic construct
  source 1..20: mol_type = other DNA
atcacagagcttggttcatc

SEQ ID NO: 3413 - DNA, 20 bp, synthetic construct
  source 1..20: mol_type = other DNA
gactgcagattttctttcct

SEQ ID NO: 3414 - DNA, 20 bp, synthetic construct
  source 1..20: mol_type = other DNA
gtcttccctgatagactagt

SEQ ID NO: 3415 - DNA, 20 bp, synthetic construct
  source 1..20: mol_type = other DNA
tcctcatcacattcccccac

SEQ ID NO: 3416 - DNA, 20 bp, synthetic construct
  source 1..20: mol_type = other DNA
agagttacctcctccctggg

SEQ ID NO: 3417 - DNA, 20 bp, synthetic construct
  source 1..20: mol_type = other DNA
gtgcaagagttacctcctcc

SEQ ID NO: 3418 - DNA, 20 bp, synthetic construct
  source 1..20: mol_type = other DNA
tagcagtgcaagagttacct

SEQ ID NO: 3419 - DNA, 20 bp, synthetic construct
  source 1..20: mol_type = other DNA
tcagttagcagtgcaagagt

SEQ ID NO: 3420 - DNA, 20 bp, synthetic construct
  source 1..20: mol_type = other DNA
tcctatcagttagcagtgca

SEQ ID NO: 3421 - DNA, 20 bp, synthetic construct
  source 1..20: mol_type = other DNA
ataattcctatcagttagca

SEQ ID NO: 3422 - DNA, 20 bp, synthetic construct
  source 1..20: mol_type = other DNA
gctagataattcctatcagt

SEQ ID NO: 3423 - DNA, 20 bp, synthetic construct
  source 1..20: mol_type = other DNA
attttgctagataattccta

SEQ ID NO: 3424 - DNA, 20 bp, synthetic construct
  source 1..20: mol_type = other DNA
cctctattttgctagataat

SEQ ID NO: 3425 - DNA, 20 bp, synthetic construct
  source 1..20: mol_type = other DNA
ttctgataaaaattctcttc

SEQ ID NO: 3426 - DNA, 20 bp, synthetic construct
  source 1..20: mol_type = other DNA
attgtttctgataaaaattc

SEQ ID NO: 3427 - DNA, 20 bp, synthetic construct
  source 1..20: mol_type = other DNA
aggctattgtttctgataaa

SEQ ID NO: 3428 - DNA, 20 bp, synthetic construct
  source 1..20: mol_type = other DNA
ctatgctgcagtcatattaa

SEQ ID NO: 3429 - DNA, 20 bp, synthetic construct
  source 1..20: mol_type = other DNA
caggtctatgctgcagtcat

SEQ ID NO: 3430 - DNA, 20 bp, synthetic construct
  source 1..20: mol_type = other DNA
tctgacaggtctatgctgca

SEQ ID NO: 3431 - DNA, 20 bp, synthetic construct
  source 1..20: mol_type = other DNA
actcttctgacaggtctatg

SEQ ID NO: 3432 - DNA, 20 bp, synthetic construct
  source 1..20: mol_type = other DNA
tttccactcttctgacaggt

SEQ ID NO: 3433 - DNA, 20 bp, synthetic construct
  source 1..20: mol_type = other DNA
attctttagaatcctctaaa

SEQ ID NO: 3434 - DNA, 20 bp, synthetic construct
  source 1..20: mol_type = other DNA
aggtaattctttagaatcct

SEQ ID NO: 3435 - DNA, 20 bp, synthetic construct
  source 1..20: mol_type = other DNA
aagggcccatgtgctcctgg

SEQ ID NO: 3436 - DNA, 20 bp, synthetic construct
  source 1..20: mol_type = other DNA
ctgccaagggcccatgtgct

SEQ ID NO: 3437 - DNA, 20 bp, synthetic construct
  source 1..20: mol_type = other DNA
gtccactgccaagggcccat

SEQ ID NO: 3438 - DNA, 20 bp, synthetic construct
  source 1..20: mol_type = other DNA
ctcaagtccactgccaaggg

SEQ ID NO: 3439 - DNA, 20 bp, synthetic construct
  source 1..20: mol_type = other DNA
ggcccctcaagtccactgcc

SEQ ID NO: 3440 - DNA, 20 bp, synthetic construct
  source 1..20: mol_type = other DNA
gctttggcccctcaagtcca

SEQ ID NO: 3441 - DNA, 20 bp, synthetic construct
  source 1..20: mol_type = other DNA
taaaagtacaaggcaggaca

SEQ ID NO: 3442 - DNA, 20 bp, synthetic construct
  source 1..20: mol_type = other DNA
tccctgttgctttgtctcta

SEQ ID NO: 3443 - DNA, 20 bp, synthetic construct
  source 1..20: mol_type = other DNA
ctgcctccctgttgctttgt

SEQ ID NO: 3444 - DNA, 20 bp, synthetic construct
  source 1..20: mol_type = other DNA
tcctgctgcctccctgttgc

SEQ ID NO: 3445 - DNA, 20 bp, synthetic construct
  source 1..20: mol_type = other DNA
aatgttcctgctgcctccct

SEQ ID NO: 3446 - DNA, 20 bp, synthetic construct
  source 1..20: mol_type = other DNA
atggaaatgttcctgctgcc

SEQ ID NO: 3447 - DNA, 20 bp, synthetic construct
  source 1..20: mol_type = other DNA
tgtgcatggaaatgttcctg

SEQ ID NO: 3448 - DNA, 20 bp, synthetic construct
  source 1..20: mol_type = other DNA
acacctgtgcatggaaatgt

SEQ ID NO: 3449 - DNA, 20 bp, synthetic construct
  source 1..20: mol_type = other DNA
cagccacacctgtgcatgga

SEQ ID NO: 3450 - DNA, 20 bp, synthetic construct
  source 1..20: mol_type = other DNA
ctccccagccacacctgtgc

SEQ ID NO: 3451 - DNA, 20 bp, synthetic construct
  source 1..20: mol_type = other DNA
agcccctccccagccacacc

SEQ ID NO: 3452 - DNA, 20 bp, synthetic construct
  source 1..20: mol_type = other DNA
cttcacattgcccacaggac

SEQ ID NO: 3453 - DNA, 20 bp, synthetic construct
  source 1..20: mol_type = other DNA
aattccttcacattgcccac

SEQ ID NO: 3454 - DNA, 20 bp, synthetic construct
  source 1..20: mol_type = other DNA
gagcaaattccttcacattg

SEQ ID NO: 3455 - DNA, 20 bp, synthetic construct
  source 1..20: mol_type = other DNA
gtgaagagcaaattccttca

SEQ ID NO: 3456 - DNA, 20 bp, synthetic construct
  source 1..20: mol_type = other DNA
tcaaggtgaagagcaaattc

SEQ ID NO: 3457 - DNA, 20 bp, synthetic construct
  source 1..20: mol_type = other DNA
cattctcaaggtgaagagca

SEQ ID NO: 3458 - DNA, 20 bp, synthetic construct
  source 1..20: mol_type = other DNA
ctctccattctcaaggtgaa

SEQ ID NO: 3459 - DNA, 20 bp, synthetic construct
  source 1..20: mol_type = other DNA
cctcccaaacactctctggt

SEQ ID NO: 3460 - DNA, 20 bp, synthetic construct
  source 1..20: mol_type = other DNA
cttcccctcccaaacactct

SEQ ID NO: 3461 - DNA, 20 bp, synthetic construct
  source 1..20: mol_type = other DNA
aaaaatatacatgctctttt

SEQ ID NO: 3462 - DNA, 20 bp, synthetic construct
  source 1..20: mol_type = other DNA
caaaaatatacatgctcttt

SEQ ID NO: 3463 - DNA, 20 bp, synthetic construct
  source 1..20: mol_type = other DNA
tcaaaaatatacatgctctt

SEQ ID NO: 3464 - DNA, 20 bp, synthetic construct
  source 1..20: mol_type = other DNA
ctcaaaaatatacatgctct

SEQ ID NO: 3465 - DNA, 20 bp, synthetic construct
  source 1..20: mol_type = other DNA
tactcaaaaatatacatgct

SEQ ID NO: 3466 - DNA, 20 bp, synthetic construct
  source 1..20: mol_type = other DNA
ctactcaaaaatatacatgc

SEQ ID NO: 3467 - DNA, 20 bp, synthetic construct
  source 1..20: mol_type = other DNA
tctactcaaaaatatacatg

SEQ ID NO: 3468 - DNA, 20 bp, synthetic construct
  source 1..20: mol_type = other DNA
ccagcactaatttttacaac

SEQ ID NO: 3469 - DNA, 20 bp, synthetic construct
  source 1..20: mol_type = other DNA
tccagcactaatttttacaa

SEQ ID NO: 3470 - DNA, 20 bp, synthetic construct
  source 1..20: mol_type = other DNA
atccagcactaatttttaca

SEQ ID NO: 3471 - DNA, 20 bp, synthetic construct
  source 1..20: mol_type = other DNA
gtggctctctagatagggtg

SEQ ID NO: 3472 - DNA, 20 bp, synthetic construct
  source 1..20: mol_type = other DNA
ctcagccttggagccagctc

SEQ ID NO: 3473 - DNA, 20 bp, synthetic construct
  source 1..20: mol_type = other DNA
actcagccttggagccagct

SEQ ID NO: 3474 - DNA, 20 bp, synthetic construct
  source 1..20: mol_type = other DNA
cactcagccttggagccagc

SEQ ID NO: 3475 - DNA, 20 bp, synthetic construct
  source 1..20: mol_type = other DNA
ccactcagccttggagccag

SEQ ID NO: 3476 - DNA, 20 bp, synthetic construct
  source 1..20: mol_type = other DNA
tgccactcagccttggagcc

SEQ ID NO: 3477 - DNA, 20 bp, synthetic construct
  source 1..20: mol_type = other DNA
ttgccactcagccttggagc

SEQ ID NO: 3478 - DNA, 20 bp, synthetic construct
  source 1..20: mol_type = other DNA
ggagtttgtgtttcccattt

SEQ ID NO: 3479 - DNA, 20 bp, synthetic construct
  source 1..20: mol_type = other DNA
aaggagtttgtgtttcccat

SEQ ID NO: 3480 - DNA, 20 bp, synthetic construct
  source 1..20: mol_type = other DNA
aaaggagtttgtgtttccca

SEQ ID NO: 3481 - DNA, 20 bp, synthetic construct
  source 1..20: mol_type = other DNA
gaaaaggagtttgtgtttcc

SEQ ID NO: 3482 - DNA, 20 bp, synthetic construct
  source 1..20: mol_type = other DNA
agaaaaggagtttgtgtttc

SEQ ID NO: 3483 - DNA, 20 bp, synthetic construct
  source 1..20: mol_type = other DNA
aagaaaaggagtttgtgttt

SEQ ID NO: 3484 - DNA, 20 bp, synthetic construct
  source 1..20: mol_type = other DNA
taagaaaaggagtttgtgtt

SEQ ID NO: 3485 - DNA, 20 bp, synthetic construct
  source 1..20: mol_type = other DNA
attttcacaaggagaagctg

SEQ ID NO: 3486 - DNA, 20 bp, synthetic construct
  source 1..20: mol_type = other DNA
cattttcacaaggagaagct

SEQ ID NO: 3487 - DNA, 20 bp, synthetic construct
  source 1..20: mol_type = other DNA
ccattttcacaaggagaagc

SEQ ID NO: 3488 - DNA, 20 bp, synthetic construct
  source 1..20: mol_type = other DNA
gcaccattttcacaaggaga

SEQ ID NO: 3489 - DNA, 20 bp, synthetic construct
  source 1..20: mol_type = other DNA
tgcaccattttcacaaggag

SEQ ID NO: 3490 - DNA, 20 bp, synthetic construct
  source 1..20: mol_type = other DNA
gtgcaccattttcacaagga

SEQ ID NO: 3491 - DNA, 20 bp, synthetic construct
  source 1..20: mol_type = other DNA
agtgcaccattttcacaagg

SEQ ID NO: 3492 - DNA, 20 bp, synthetic construct
  source 1..20: mol_type = other DNA
catcacaatatatgggcaag

SEQ ID NO: 3493 - DNA, 20 bp, synthetic construct
  source 1..20: mol_type = other DNA
ccatcacaatatatgggcaa

SEQ ID NO: 3494 - DNA, 20 bp, synthetic construct
  source 1..20: mol_type = other DNA
cccatcacaatatatgggca

SEQ ID NO: 3495 - DNA, 20 bp, synthetic construct
  source 1..20: mol_type = other DNA
ccccatcacaatatatgggc

SEQ ID NO: 3496 - DNA, 20 bp, synthetic construct
  source 1..20: mol_type = other DNA
aggtaaggccaaggaagtga

SEQ ID NO: 3497 - DNA, 20 bp, synthetic construct
  source 1..20: mol_type = other DNA
gaggtaaggccaaggaagtg

SEQ ID NO: 3498 - DNA, 20 bp, synthetic construct
  source 1..20: mol_type = other DNA
agaggtaaggccaaggaagt

SEQ ID NO: 3499 - DNA, 20 bp, synthetic construct
  source 1..20: mol_type = other DNA
aagaggtaaggccaaggaag

SEQ ID NO: 3500 - DNA, 20 bp, synthetic construct
  source 1..20: mol_type = other DNA
cacctgggtttttgtgtatt

SEQ ID NO: 3501 - DNA, 20 bp, synthetic construct
  source 1..20: mol_type = other DNA
acacctgggtttttgtgtat

SEQ ID NO: 3502 - DNA, 20 bp, synthetic construct
  source 1..20: mol_type = other DNA
tacacctgggtttttgtgta

SEQ ID NO: 3503 - DNA, 20 bp, synthetic construct
  source 1..20: mol_type = other DNA
atacacctgggtttttgtgt

SEQ ID NO: 3504 - DNA, 20 bp, synthetic construct
  source 1..20: mol_type = other DNA
tctgagtgctgctaacttgg

SEQ ID NO: 3505 - DNA, 20 bp, synthetic construct
  source 1..20: mol_type = other DNA
atctgagtgctgctaacttg

SEQ ID NO: 3506 - DNA, 20 bp, synthetic construct
  source 1..20: mol_type = other DNA
aatctgagtgctgctaactt

SEQ ID NO: 3507 - DNA, 20 bp, synthetic construct
  source 1..20: mol_type = other DNA
aaatctgagtgctgctaact

SEQ ID NO: 3508 - DNA, 20 bp, synthetic construct
  source 1..20: mol_type = other DNA
tgaaatctgagtgctgctaa

SEQ ID NO: 3509 - DNA, 20 bp, synthetic construct
  source 1..20: mol_type = other DNA
ttgaaatctgagtgctgcta

SEQ ID NO: 3510 - DNA, 20 bp, synthetic construct
  source 1..20: mol_type = other DNA
gttgaaatctgagtgctgct

SEQ ID NO: 3511 - DNA, 20 bp, synthetic construct
  source 1..20: mol_type = other DNA
gcactaaattaggaagctgg

SEQ ID NO: 3512 - DNA, 20 bp, synthetic construct
  source 1..20: mol_type = other DNA
agcactaaattaggaagctg

SEQ ID NO: 3513 - DNA, 20 bp, synthetic construct
  source 1..20: mol_type = other DNA
ctgggacatctggcccaaag

SEQ ID NO: 3514 - DNA, 20 bp, synthetic construct
  source 1..20: mol_type = other DNA
actgggacatctggcccaaa

SEQ ID NO: 3515 - DNA, 20 bp, synthetic construct
  source 1..20: mol_type = other DNA
cactgggacatctggcccaa

SEQ ID NO: 3516 - DNA, 20 bp, synthetic construct
  source 1..20: mol_type = other DNA
ccactgggacatctggccca

SEQ ID NO: 3517 - DNA, 20 bp, synthetic construct
  source 1..20: mol_type = other DNA
gcccactgggacatctggcc

SEQ ID NO: 3518 - DNA, 20 bp, synthetic construct
  source 1..20: mol_type = other DNA
ggcccactgggacatctggc

SEQ ID NO: 3519 - DNA, 20 bp, synthetic construct
  source 1..20: mol_type = other DNA
ccttaaagcagggcccactg

SEQ ID NO: 3520 - DNA, 20 bp, synthetic construct
  source 1..20: mol_type = other DNA
tccttaaagcagggcccact

SEQ ID NO: 3521 - DNA, 20 bp, synthetic construct
  source 1..20: mol_type = other DNA
atccttaaagcagggcccac

SEQ ID NO: 3522 - DNA, 20 bp, synthetic construct
  source 1..20: mol_type = other DNA
tatccttaaagcagggccca

SEQ ID NO: 3523 - DNA, 20 bp, synthetic construct
  source 1..20: mol_type = other DNA
cactggtgcctaagagccct

SEQ ID NO: 3524 - DNA, 20 bp, synthetic construct
  source 1..20: mol_type = other DNA
ccactggtgcctaagagccc

SEQ ID NO: 3525 - DNA, 20 bp, synthetic construct
  source 1..20: mol_type = other DNA
tccactggtgcctaagagcc

SEQ ID NO: 3526 - DNA, 20 bp, synthetic construct
  source 1..20: mol_type = other DNA
ctccactggtgcctaagagc

SEQ ID NO: 3527 - DNA, 20 bp, synthetic construct
  source 1..20: mol_type = other DNA
gaggctgagttctgctcctg

SEQ ID NO: 3528 - DNA, 20 bp, synthetic construct
  source 1..20: mol_type = other DNA
agaggctgagttctgctcct

SEQ ID NO: 3529 - DNA, 20 bp, synthetic construct
  source 1..20: mol_type = other DNA
tagaggctgagttctgctcc

SEQ ID NO: 3530 - DNA, 20 bp, synthetic construct
  source 1..20: mol_type = other DNA
ctagaggctgagttctgctc

SEQ ID NO: 3531 - DNA, 20 bp, synthetic construct
  source 1..20: mol_type = other DNA
tgctagaggctgagttctgc

SEQ ID NO: 3532 - DNA, 20 bp, synthetic construct
  source 1..20: mol_type = other DNA
ctgctagaggctgagttctg

SEQ ID NO: 3533 - DNA, 20 bp, synthetic construct
  source 1..20: mol_type = other DNA
tctgctagaggctgagttct

SEQ ID NO: 3534 - DNA, 20 bp, synthetic construct
  source 1..20: mol_type = other DNA
atctgctagaggctgagttc

SEQ ID NO: 3535 - DNA, 20 bp, synthetic construct
  source 1..20: mol_type = other DNA
cttgggcatctgctagaggc

SEQ ID NO: 3536 - DNA, 20 bp, synthetic construct
  source 1..20: mol_type = other DNA
tcttgggcatctgctagagg

SEQ ID NO: 3537 - DNA, 20 bp, synthetic construct
  source 1..20: mol_type = other DNA
ttcttgggcatctgctagag

SEQ ID NO: 3538 - DNA, 20 bp, synthetic construct
  source 1..20: mol_type = other DNA
cttcttgggcatctgctaga

SEQ ID NO: 3539 - DNA, 20 bp, synthetic construct
  source 1..20: mol_type = other DNA
tgcttcttgggcatctgcta

SEQ ID NO: 3540 - DNA, 20 bp, synthetic construct
  source 1..20: mol_type = other DNA
ctgcttcttgggcatctgct

SEQ ID NO: 3541 - DNA, 20 bp, synthetic construct
  source 1..20: mol_type = other DNA
tctgcttcttgggcatctgc

SEQ ID NO: 3542 - DNA, 20 bp, synthetic construct
  source 1..20: mol_type = other DNA
ctctgcttcttgggcatctg

SEQ ID NO: 3543 - DNA, 20 bp, synthetic construct
  source 1..20: mol_type = other DNA
tcctctgcttcttgggcatc

SEQ ID NO: 3544 - DNA, 20 bp, synthetic construct
  source 1..20: mol_type = other DNA
ctcctctgcttcttgggcat

SEQ ID NO: 3545 - DNA, 20 bp, synthetic construct
  source 1..20: mol_type = other DNA
tctcctctgcttcttgggca

SEQ ID NO: 3546 - DNA, 20 bp, synthetic construct
  source 1..20: mol_type = other DNA
ctttctaagtaccctttaca

SEQ ID NO: 3547 - DNA, 20 bp, synthetic construct
  source 1..20: mol_type = other DNA
gctttctaagtaccctttac

SEQ ID NO: 3548 - DNA, 20 bp, synthetic construct
  source 1..20: mol_type = other DNA
tgctttctaagtacccttta

SEQ ID NO: 3549 - DNA, 20 bp, synthetic construct
  source 1..20: mol_type = other DNA
gtgctttctaagtacccttt

SEQ ID NO: 3550 - DNA, 20 bp, synthetic construct
  source 1..20: mol_type = other DNA
cagtgctttctaagtaccct

SEQ ID NO: 3551 - DNA, 20 bp, synthetic construct
  source 1..20: mol_type = other DNA
agggaaaggtcttctccagc

SEQ ID NO: 3552 - DNA, 20 bp, synthetic construct
  source 1..20: mol_type = other DNA
gagggaaaggtcttctccag

SEQ ID NO: 3553 - DNA, 20 bp, synthetic construct
  source 1..20: mol_type = other DNA
ggagggaaaggtcttctcca

SEQ ID NO: 3554 - DNA, 20 bp, synthetic construct
  source 1..20: mol_type = other DNA
aggagggaaaggtcttctcc

SEQ ID NO: 3555 - DNA, 20 bp, synthetic construct
  source 1..20: mol_type = other DNA
gtctcattcatctgggccct

SEQ ID NO: 3556 - DNA, 20 bp, synthetic construct
  source 1..20: mol_type = other DNA
tgtctcattcatctgggccc

SEQ ID NO: 3557 - DNA, 20 bp, synthetic construct
  source 1..20: mol_type = other DNA
atgtctcattcatctgggcc

SEQ ID NO: 3558 - DNA, 20 bp, synthetic construct
  source 1..20: mol_type = other DNA
cccctgtactcagccctttc

SEQ ID NO: 3559 - DNA, 20 bp, synthetic construct
  source 1..20: mol_type = other DNA
acccctgtactcagcccttt

SEQ ID NO: 3560 - DNA, 20 bp, synthetic construct
  source 1..20: mol_type = other DNA
cacccctgtactcagccctt

SEQ ID NO: 3561 - DNA, 20 bp, synthetic construct
  source 1..20: mol_type = other DNA
tcacccctgtactcagccct

SEQ ID NO: 3562 - DNA, 20 bp, synthetic construct
  source 1..20: mol_type = other DNA
tctcacccctgtactcagcc

SEQ ID NO: 3563 - DNA, 20 bp, synthetic construct
  source 1..20: mol_type = other DNA
atctcacccctgtactcagc

SEQ ID NO: 3564 - DNA, 20 bp, synthetic construct
  source 1..20: mol_type = other DNA
catctcacccctgtactcag

SEQ ID NO: 3565 - DNA, 20 bp, synthetic construct
  source 1..20: mol_type = other DNA
ccatctcacccctgtactca

SEQ ID NO: 3566 - DNA, 20 bp, synthetic construct
  source 1..20: mol_type = other DNA
aagtcttccttctcctccac

SEQ ID NO: 3567 - DNA, 20 bp, synthetic construct
  source 1..20: mol_type = other DNA
aaagtcttccttctcctcca

SEQ ID NO: 3568 - DNA, 20 bp, synthetic construct
  source 1..20: mol_type = other DNA
gaaagtcttccttctcctcc

SEQ ID NO: 3569 - DNA, 20 bp, synthetic construct
  source 1..20: mol_type = other DNA
ggaaagtcttccttctcctc

SEQ ID NO: 3570 - DNA, 20 bp, synthetic construct
  source 1..20: mol_type = other DNA
caggtagagttctattgctt

SEQ ID NO: 3571 - DNA, 20 bp, synthetic construct
  source 1..20: mol_type = other DNA
ccaggtagagttctattgct

SEQ ID NO: 3572 - DNA, 20 bp, synthetic construct
  source 1..20: mol_type = other DNA
ggctactggcattgctcctc

SEQ ID NO: 3573 - DNA, 20 bp, synthetic construct
  source 1..20: mol_type = other DNA
tggctactggcattgctcct

SEQ ID NO: 3574 - DNA, 20 bp, synthetic construct
  source 1..20: mol_type = other DNA
gtggctactggcattgctcc

SEQ ID NO: 3575 - DNA, 20 bp, synthetic construct
  source 1..20: mol_type = other DNA
ggtggctactggcattgctc

SEQ ID NO: 3576 - DNA, 20 bp, synthetic construct
  source 1..20: mol_type = other DNA
acatgcctgagggcagcagt

SEQ ID NO: 3577 - DNA, 20 bp, synthetic construct
  source 1..20: mol_type = other DNA
cacatgcctgagggcagcag

SEQ ID NO: 3578 - DNA, 20 bp, synthetic construct
  source 1..20: mol_type = other DNA
tcacatgcctgagggcagca

SEQ ID NO: 3579 - DNA, 20 bp, synthetic construct
  source 1..20: mol_type = other DNA
ctcacatgcctgagggcagc

SEQ ID NO: 3580 - DNA, 20 bp, synthetic construct
  source 1..20: mol_type = other DNA
aatatctgatatcaaagtga

SEQ ID NO: 3581 - DNA, 20 bp, synthetic construct
  source 1..20: mol_type = other DNA
caatatctgatatcaaagtg

SEQ ID NO: 3582 - DNA, 20 bp, synthetic construct
  source 1..20: mol_type = other DNA
ccaatatctgatatcaaagt

SEQ ID NO: 3583 - DNA, 20 bp, synthetic construct
  source 1..20: mol_type = other DNA
cccaatatctgatatcaaag

SEQ ID NO: 3584 - DNA, 20 bp, synthetic construct
  source 1..20: mol_type = other DNA
tgcccaatatctgatatcaa

SEQ ID NO: 3585 - DNA, 20 bp, synthetic construct
  source 1..20: mol_type = other DNA
ttgcccaatatctgatatca

SEQ ID NO: 3586 - DNA, 20 bp, synthetic construct
  source 1..20: mol_type = other DNA
ttgcttgaggtcagggtgtg

SEQ ID NO: 3587 - DNA, 20 bp, synthetic construct
  source 1..20: mol_type = other DNA
cttgcttgaggtcagggtgt

SEQ ID NO: 3588 - DNA, 20 bp, synthetic construct
  source 1..20: mol_type = other DNA
acttgcttgaggtcagggtg

SEQ ID NO: 3589 - DNA, 20 bp, synthetic construct
  source 1..20: mol_type = other DNA
cacttgcttgaggtcagggt

SEQ ID NO: 3590 - DNA, 20 bp, synthetic construct
  source 1..20: mol_type = other DNA
atcacttgcttgaggtcagg

SEQ ID NO: 3591 - DNA, 20 bp, synthetic construct
  source 1..20: mol_type = other DNA
aatcacttgcttgaggtcag

SEQ ID NO: 3592 - DNA, 20 bp, synthetic construct
  source 1..20: mol_type = other DNA
aaatcacttgcttgaggtca

SEQ ID NO: 3593 - DNA, 20 bp, synthetic construct
  source 1..20: mol_type = other DNA
aaaatcacttgcttgaggtc

SEQ ID NO: 3594 - DNA, 20 bp, synthetic construct
  source 1..20: mol_type = other DNA
ggtacaagtttctccaccta

SEQ ID NO: 3595 - DNA, 20 bp, synthetic construct
  source 1..20: mol_type = other DNA
aggtacaagtttctccacct

SEQ ID NO: 3596 - DNA, 20 bp, synthetic construct
  source 1..20: mol_type = other DNA
taggtacaagtttctccacc

SEQ ID NO: 3597 - DNA, 20 bp, synthetic construct
  source 1..20: mol_type = other DNA
ctaggtacaagtttctccac

SEQ ID NO: 3598 - DNA, 20 bp, synthetic construct
  source 1..20: mol_type = other DNA
atagctgagcaaatccataa

SEQ ID NO: 3599 - DNA, 20 bp, synthetic construct
  source 1..20: mol_type = other DNA
catagctgagcaaatccata

SEQ ID NO: 3600 - DNA, 20 bp, synthetic construct
  source 1..20: mol_type = other DNA
gcatagctgagcaaatccat

SEQ ID NO: 3601 - DNA, 20 bp, synthetic construct
  source 1..20: mol_type = other DNA
tgcatagctgagcaaatcca

SEQ ID NO: 3602 - DNA, 20 bp, synthetic construct
  source 1..20: mol_type = other DNA
actgcatagctgagcaaatc

SEQ ID NO: 3603 - DNA, 20 bp, synthetic construct
  source 1..20: mol_type = other DNA
tactgcatagctgagcaaat

SEQ ID NO: 3604 - DNA, 20 bp, synthetic construct
  source 1..20: mol_type = other DNA
ttactgcatagctgagcaaa

SEQ ID NO: 3605 - DNA, 20 bp, synthetic construct
  source 1..20: mol_type = other DNA
tttactgcatagctgagcaa

SEQ ID NO: 3606 - DNA, 20 bp, synthetic construct
  source 1..20: mol_type = other DNA
ggtttactgcatagctgagc

SEQ ID NO: 3607 - DNA, 20 bp, synthetic construct
  source 1..20: mol_type = other DNA
aggtttactgcatagctgag

SEQ ID NO: 3608 - DNA, 20 bp, synthetic construct
  source 1..20: mol_type = other DNA
gaggtttactgcatagctga

SEQ ID NO: 3609 - DNA, 20 bp, synthetic construct
  source 1..20: mol_type = other DNA
agaggtttactgcatagctg

SEQ ID NO: 3610 - DNA, 20 bp, synthetic construct
  source 1..20: mol_type = other DNA
atagaggtttactgcatagc

SEQ ID NO: 3611 - DNA, 20 bp, synthetic construct
  source 1..20: mol_type = other DNA
catagaggtttactgcatag

SEQ ID NO: 3612 - DNA, 20 bp, synthetic construct
  source 1..20: mol_type = other DNA
actctctctgcacactccca

SEQ ID NO: 3613 - DNA, 20 bp, synthetic construct
  source 1..20: mol_type = other DNA
cactctctctgcacactccc

SEQ ID NO: 3614 - DNA, 20 bp, synthetic construct
  source 1..20: mol_type = other DNA
gcactctctctgcacactcc

SEQ ID NO: 3615 - DNA, 20 bp, synthetic construct
  source 1..20: mol_type = other DNA
tgcactctctctgcacactc

SEQ ID NO: 3616 - DNA, 20 bp, synthetic construct
  source 1..20: mol_type = other DNA
tgctgattacaagctgattc

SEQ ID NO: 3617 - DNA, 20 bp, synthetic construct
  source 1..20: mol_type = other DNA
ctgctgattacaagctgatt

SEQ ID NO: 3618 - DNA, 20 bp, synthetic construct
  source 1..20: mol_type = other DNA
actgctgattacaagctgat

SEQ ID NO: 3619 - DNA, 20 bp, synthetic construct
  source 1..20: mol_type = other DNA
aactgctgattacaagctga

SEQ ID NO: 3620 - DNA, 20 bp, synthetic construct
  source 1..20: mol_type = other DNA
tggtgataaggcagcagtct

SEQ ID NO: 3621 - DNA, 20 bp, synthetic construct
  source 1..20: mol_type = other DNA
atggtgataaggcagcagtc

SEQ ID NO: 3622 - DNA, 20 bp, synthetic construct
  source 1..20: mol_type = other DNA
gatggtgataaggcagcagt

SEQ ID NO: 3623 - DNA, 20 bp, synthetic construct
  source 1..20: mol_type = other DNA
agatggtgataaggcagcag

SEQ ID NO: 3624 - DNA, 20 bp, synthetic construct
  source 1..20: mol_type = other DNA
agagatggtgataaggcagc

SEQ ID NO: 3625 - DNA, 20 bp, synthetic construct
  source 1..20: mol_type = other DNA
cagagatggtgataaggcag

SEQ ID NO: 3626 - DNA, 20 bp, synthetic construct
  source 1..20: mol_type = other DNA
ccagagatggtgataaggca

SEQ ID NO: 3627 - DNA, 20 bp, synthetic construct
  source 1..20: mol_type = other DNA
cccagagatggtgataaggc

SEQ ID NO: 3628 - DNA, 20 bp, synthetic construct
  source 1..20: mol_type = other DNA
agacttgcccagcaacccat

SEQ ID NO: 3629 - DNA, 20 bp, synthetic construct
  source 1..20: mol_type = other DNA
cagacttgcccagcaaccca

SEQ ID NO: 3630 - DNA, 20 bp, synthetic construct
  source 1..20: mol_type = other DNA
ccagacttgcccagcaaccc

SEQ ID NO: 3631 - DNA, 20 bp, synthetic construct
  source 1..20: mol_type = other DNA
tccagacttgcccagcaacc

SEQ ID NO: 3632 - DNA, 20 bp, synthetic construct
  source 1..20: mol_type = other DNA
aaacctaggttcagactttg

SEQ ID NO: 3633 - DNA, 20 bp, synthetic construct
  source 1..20: mol_type = other DNA
caaacctaggttcagacttt

SEQ ID NO: 3634 - DNA, 20 bp, synthetic construct
  source 1..20: mol_type = other DNA
gtcaaacctaggttcagact

SEQ ID NO: 3635 - DNA, 20 bp, synthetic construct
  source 1..20: mol_type = other DNA
gagtcaaacctaggttcaga

SEQ ID NO: 3636 - DNA, 20 bp, synthetic construct
  source 1..20: mol_type = other DNA
agagtcaaacctaggttcag

SEQ ID NO: 3637 - DNA, 20 bp, synthetic construct
  source 1..20: mol_type = other DNA
aagagtcaaacctaggttca

SEQ ID NO: 3638 - DNA, 20 bp, synthetic construct
  source 1..20: mol_type = other DNA
gaagagtcaaacctaggttc

SEQ ID NO: 3639 - DNA, 20 bp, synthetic construct
  source 1..20: mol_type = other DNA
gagcatccccaatccctgct

SEQ ID NO: 3640 - DNA, 20 bp, synthetic construct
  source 1..20: mol_type = other DNA
tgagcatccccaatccctgc

SEQ ID NO: 3641 - DNA, 20 bp, synthetic construct
  source 1..20: mol_type = other DNA
ttgagcatccccaatccctg

SEQ ID NO: 3642 - DNA, 20 bp, synthetic construct
  source 1..20: mol_type = other DNA
tttgagcatccccaatccct

SEQ ID NO: 3643 - DNA, 20 bp, synthetic construct
  source 1..20: mol_type = other DNA
actttgagcatccccaatcc

SEQ ID NO: 3644 - DNA, 20 bp, synthetic construct
  source 1..20: mol_type = other DNA
tactttgagcatccccaatc

SEQ ID NO: 3645 - DNA, 20 bp, synthetic construct
  source 1..20: mol_type = other DNA
gtactttgagcatccccaat

SEQ ID NO: 3646 - DNA, 20 bp, synthetic construct
  source 1..20: mol_type = other DNA
tgtactttgagcatccccaa

SEQ ID NO: 3647 - DNA, 20 bp, synthetic construct
  source 1..20: mol_type = other DNA
agtgtactttgagcatcccc

SEQ ID NO: 3648 - DNA, 20 bp, synthetic construct
  source 1..20: mol_type = other DNA
aagtgtactttgagcatccc

SEQ ID NO: 3649 - DNA, 20 bp, synthetic construct
  source 1..20: mol_type = other DNA
caagtgtactttgagcatcc

SEQ ID NO: 3650 - DNA, 20 bp, synthetic construct
  source 1..20: mol_type = other DNA
ccaagtgtactttgagcatc

SEQ ID NO: 3651 - DNA, 20 bp, synthetic construct
  source 1..20: mol_type = other DNA
ctccaagtgtactttgagca

SEQ ID NO: 3652 - DNA, 20 bp, synthetic construct
  source 1..20: mol_type = other DNA
cagaggttcaacatccaatt

SEQ ID NO: 3653 - DNA, 20 bp, synthetic construct
  source 1..20: mol_type = other DNA
acagaggttcaacatccaat

SEQ ID NO: 3654 - DNA, 20 bp, synthetic construct
  source 1..20: mol_type = other DNA
gacagaggttcaacatccaa

SEQ ID NO: 3655 - DNA, 20 bp, synthetic construct
  source 1..20: mol_type = other DNA
ggacagaggttcaacatcca

SEQ ID NO: 3656 - DNA, 20 bp, synthetic construct
  source 1..20: mol_type = other DNA
caaggacagaggttcaacat

SEQ ID NO: 3657 - DNA, 20 bp, synthetic construct
  source 1..20: mol_type = other DNA
ccaaggacagaggttcaaca

SEQ ID NO: 3658 - DNA, 20 bp, synthetic construct
  source 1..20: mol_type = other DNA
gccaaggacagaggttcaac

SEQ ID NO: 3659 - DNA, 20 bp, synthetic construct
  source 1..20: mol_type = other DNA
ggccaaggacagaggttcaa

SEQ ID NO: 3660 - DNA, 20 bp, synthetic construct
  source 1..20: mol_type = other DNA
gaggccaaggacagaggttc

SEQ ID NO: 3661 - DNA, 20 bp, synthetic construct
  source 1..20: mol_type = other DNA
tgaggccaaggacagaggtt

SEQ ID NO: 3662 - DNA, 20 bp, synthetic construct
  source 1..20: mol_type = other DNA
gtgaggccaaggacagaggt

SEQ ID NO: 3663 - DNA, 20 bp, synthetic construct
  source 1..20: mol_type = other DNA
tgtgaggccaaggacagagg

SEQ ID NO: 3664 - DNA, 20 bp, synthetic construct
  source 1..20: mol_type = other DNA
tctgtgaggccaaggacaga

SEQ ID NO: 3665 - DNA, 20 bp, synthetic construct
  source 1..20: mol_type = other DNA
gtctgtgaggccaaggacag

SEQ ID NO: 3666 - DNA, 20 bp, synthetic construct
  source 1..20: mol_type = other DNA
tgtctgtgaggccaaggaca

SEQ ID NO: 3667 - DNA, 20 bp, synthetic construct
  source 1..20: mol_type = other DNA
ctgtctgtgaggccaaggac

SEQ ID NO: 3668 - DNA, 20 bp, synthetic construct
  source 1..20: mol_type = other DNA
agtctctcataattgccagt

SEQ ID NO: 3669 - DNA, 20 bp, synthetic construct
  source 1..20: mol_type = other DNA
aagtctctcataattgccag

SEQ ID NO: 3670 - DNA, 20 bp, synthetic construct
  source 1..20: mol_type = other DNA
gaagtctctcataattgcca

SEQ ID NO: 3671 - DNA, 20 bp, synthetic construct
  source 1..20: mol_type = other DNA
ggaagtctctcataattgcc

SEQ ID NO: 3672 - DNA, 20 bp, synthetic construct
  source 1..20: mol_type = other DNA
tgggaagtctctcataattg

SEQ ID NO: 3673 - DNA, 20 bp, synthetic construct
  source 1..20: mol_type = other DNA
ttgggaagtctctcataatt

SEQ ID NO: 3674 - DNA, 20 bp, synthetic construct
  source 1..20: mol_type = other DNA
cttgggaagtctctcataat

SEQ ID NO: 3675 - DNA, 20 bp, synthetic construct
  source 1..20: mol_type = other DNA
ccttgggaagtctctcataa

SEQ ID NO: 3676 - DNA, 20 bp, synthetic construct
  source 1..20: mol_type = other DNA
ggccttgggaagtctctcat

SEQ ID NO: 3677 - DNA, 20 bp, synthetic construct
  source 1..20: mol_type = other DNA
aggccttgggaagtctctca

SEQ ID NO: 3678 - DNA, 20 bp, synthetic construct
  source 1..20: mol_type = other DNA
taggccttgggaagtctctc

SEQ ID NO: 3679 - DNA, 20 bp, synthetic construct
  source 1..20: mol_type = other DNA
ctaggccttgggaagtctct

SEQ ID NO: 3680 - DNA, 20 bp, synthetic construct
  source 1..20: mol_type = other DNA
cattttggagaccacatgaa

SEQ ID NO: 3681 - DNA, 20 bp, synthetic construct
  source 1..20: mol_type = other DNA
tcattttggagaccacatga

SEQ ID NO: 3682 - DNA, 20 bp, synthetic construct
  source 1..20: mol_type = other DNA
gtcattttggagaccacatg

SEQ ID NO: 3683 - DNA, 20 bp, synthetic construct
  source 1..20: mol_type = other DNA
ggtcattttggagaccacat

SEQ ID NO: 3684 - DNA, 20 bp, synthetic construct
  source 1..20: mol_type = other DNA
aatgggaatggtatcgcact

SEQ ID NO: 3685 - DNA, 20 bp, synthetic construct
  source 1..20: mol_type = other DNA
caatgggaatggtatcgcac

SEQ ID NO: 3686 - DNA, 20 bp, synthetic construct
  source 1..20: mol_type = other DNA
acaatgggaatggtatcgca

SEQ ID NO: 3687 - DNA, 20 bp, synthetic construct
  source 1..20: mol_type = other DNA
cacaatgggaatggtatcgc

SEQ ID NO: 3688 - DNA, 20 bp, synthetic construct
  source 1..20: mol_type = other DNA
agctatagaatcagacagac

SEQ ID NO: 3689 - DNA, 20 bp, synthetic construct
  source 1..20: mol_type = other DNA
cagctatagaatcagacaga

SEQ ID NO: 3690 - DNA, 20 bp, synthetic construct
  source 1..20: mol_type = other DNA
tcagctatagaatcagacag

SEQ ID NO: 3691 - DNA, 20 bp, synthetic construct
  source 1..20: mol_type = other DNA
catcagctatagaatcagac

SEQ ID NO: 3692 - DNA, 20 bp, synthetic construct
  source 1..20: mol_type = other DNA
gcacttgatctgggacccaa

SEQ ID NO: 3693 - DNA, 20 bp, synthetic construct
  source 1..20: mol_type = other DNA
agcacttgatctgggaccca

SEQ ID NO: 3694 - DNA, 20 bp, synthetic construct
  source 1..20: mol_type = other DNA
gagcacttgatctgggaccc

SEQ ID NO: 3695 - DNA, 20 bp, synthetic construct
  source 1..20: mol_type = other DNA
agagcacttgatctgggacc

SEQ ID NO: 3696 - DNA, 20 bp, synthetic construct
  source 1..20: mol_type = other DNA
gtagagcacttgatctggga

SEQ ID NO: 3697 - DNA, 20 bp, synthetic construct
  source 1..20: mol_type = other DNA
ggtagagcacttgatctggg

SEQ ID NO: 3698 - DNA, 20 bp, synthetic construct
  source 1..20: mol_type = other DNA
gggtagagcacttgatctgg

SEQ ID NO: 3699 - DNA, 20 bp, synthetic construct
  source 1..20: mol_type = other DNA
aactatcacaccacctccca

SEQ ID NO: 3700 - DNA, 20 bp, synthetic construct
  source 1..20: mol_type = other DNA
gaactatcacaccacctccc

SEQ ID NO: 3701 - DNA, 20 bp, synthetic construct
  source 1..20: mol_type = other DNA
ggaactatcacaccacctcc

SEQ ID NO: 3702 - DNA, 20 bp, synthetic construct
  source 1..20: mol_type = other DNA
gggaactatcacaccacctc

SEQ ID NO: 3703 - DNA, 20 bp, synthetic construct
  source 1..20: mol_type = other DNA
atgggaactatcacaccacc

SEQ ID NO: 3704 - DNA, 20 bp, synthetic construct
  source 1..20: mol_type = other DNA
aatgggaactatcacaccac

SEQ ID NO: 3705 - DNA, 20 bp, synthetic construct
  source 1..20: mol_type = other DNA
aaatgggaactatcacacca

SEQ ID NO: 3706 - DNA, 20 bp, synthetic construct
  source 1..20: mol_type = other DNA
taaatgggaactatcacacc

SEQ ID NO: 3707 - DNA, 20 bp, synthetic construct
  source 1..20: mol_type = other DNA
tgaccttgggcaagttacct

SEQ ID NO: 3708 - DNA, 20 bp, synthetic construct
  source 1..20: mol_type = other DNA
gtgaccttgggcaagttacc

SEQ ID NO: 3709 - DNA, 20 bp, synthetic construct
  source 1..20: mol_type = other DNA
tgtgaccttgggcaagttac

SEQ ID NO: 3710 - DNA, 20 bp, synthetic construct
  source 1..20: mol_type = other DNA
gtgtgaccttgggcaagtta

SEQ ID NO: 3711 - DNA, 20 bp, synthetic construct
  source 1..20: mol_type = other DNA
ctgtgtgaccttgggcaagt

SEQ ID NO: 3712 - DNA, 20 bp, synthetic construct
  source 1..20: mol_type = other DNA
tctgtgtgaccttgggcaag

SEQ ID NO: 3713 - DNA, 20 bp, synthetic construct
  source 1..20: mol_type = other DNA
atctgtgtgaccttgggcaa

SEQ ID NO: 3714 - DNA, 20 bp, synthetic construct
  source 1..20: mol_type = other DNA
aatctgtgtgaccttgggca

SEQ ID NO: 3715 - DNA, 20 bp, synthetic construct
  source 1..20: mol_type = other DNA
caaatctgtgtgaccttggg

SEQ ID NO: 3716 - DNA, 20 bp, synthetic construct
  source 1..20: mol_type = other DNA
tcaaatctgtgtgaccttgg

SEQ ID NO: 3717 - DNA, 20 bp, synthetic construct
  source 1..20: mol_type = other DNA
ttcaaatctgtgtgaccttg

SEQ ID NO: 3718 - DNA, 20 bp, synthetic construct
  source 1..20: mol_type = other DNA
attcaaatctgtgtgacctt

SEQ ID NO: 3719 - DNA, 20 bp, synthetic construct
  source 1..20: mol_type = other DNA
ggattcaaatctgtgtgacc

SEQ ID NO: 3720 - DNA, 20 bp, synthetic construct
  source 1..20: mol_type = other DNA
gggattcaaatctgtgtgac

SEQ ID NO: 3721 - DNA, 20 bp, synthetic construct
  source 1..20: mol_type = other DNA
agggattcaaatctgtgtga

SEQ ID NO: 3722 - DNA, 20 bp, synthetic construct
  source 1..20: mol_type = other DNA
cagggattcaaatctgtgtg

SEQ ID NO: 3723 - DNA, 20 bp, synthetic construct
  source 1..20: mol_type = other DNA
gggaaaggcacaggctttgg

SEQ ID NO: 3724 - DNA, 20 bp, synthetic construct
  source 1..20: mol_type = other DNA
tgggaaaggcacaggctttg

SEQ ID NO: 3725 - DNA, 20 bp, synthetic construct
  source 1..20: mol_type = other DNA
tgtgggaaaggcacaggctt

SEQ ID NO: 3726 - DNA, 20 bp, synthetic construct
  source 1..20: mol_type = other DNA
aggcaaagtaacatacctgc

SEQ ID NO: 3727 - DNA, 20 bp, synthetic construct
  source 1..20: mol_type = other DNA
aaggcaaagtaacatacctg

SEQ ID NO: 3728 - DNA, 20 bp, synthetic construct
  source 1..20: mol_type = other DNA
taaggcaaagtaacatacct

SEQ ID NO: 3729 - DNA, 20 bp, synthetic construct
  source 1..20: mol_type = other DNA
ttaaggcaaagtaacatacc

SEQ ID NO: 3730 - DNA, 20 bp, synthetic construct
  source 1..20: mol_type = other DNA
ccttaaggcaaagtaacata

SEQ ID NO: 3731 - DNA, 20 bp, synthetic construct
  source 1..20: mol_type = other DNA
accttaaggcaaagtaacat

SEQ ID NO: 3732 - DNA, 20 bp, synthetic construct
  source 1..20: mol_type = other DNA
atttcttatcttcaatcctc

SEQ ID NO: 3733 - DNA, 20 bp, synthetic construct
  source 1..20: mol_type = other DNA
catttcttatcttcaatcct

SEQ ID NO: 3734 - DNA, 20 bp, synthetic construct
  source 1..20: mol_type = other DNA
tcatttcttatcttcaatcc

SEQ ID NO: 3735 - DNA, 20 bp, synthetic construct
  source 1..20: mol_type = other DNA
ctcatttcttatcttcaatc

SEQ ID NO: 3736 - DNA, 20 bp, synthetic construct
  source 1..20: mol_type = other DNA
ctctcatttcttatcttcaa

SEQ ID NO: 3737 - DNA, 20 bp, synthetic construct
  source 1..20: mol_type = other DNA
gctctcatttcttatcttca

SEQ ID NO: 3738 - DNA, 20 bp, synthetic construct
  source 1..20: mol_type = other DNA
tgctctcatttcttatcttc

SEQ ID NO: 3739 - DNA, 20 bp, synthetic construct
  source 1..20: mol_type = other DNA
gtgctctcatttcttatctt

SEQ ID NO: 3740 - DNA, 20 bp, synthetic construct
  source 1..20: mol_type = other DNA
aggtgctctcatttcttatc

SEQ ID NO: 3741 - DNA, 20 bp, synthetic construct
  source 1..20: mol_type = other DNA
caggtgctctcatttcttat

SEQ ID NO: 3742 - DNA, 20 bp, synthetic construct
  source 1..20: mol_type = other DNA
ccaggtgctctcatttctta

SEQ ID NO: 3743 - DNA, 20 bp, synthetic construct
  source 1..20: mol_type = other DNA
gccaggtgctctcatttctt

SEQ ID NO: 3744 - DNA, 20 bp, synthetic construct
  source 1..20: mol_type = other DNA
gcccatcatgaccaggccct

SEQ ID NO: 3745 - DNA, 20 bp, synthetic construct
  source 1..20: mol_type = other DNA
ggcccatcatgaccaggccc

SEQ ID NO: 3746 - DNA, 20 bp, synthetic construct
  source 1..20: mol_type = other DNA
gggcccatcatgaccaggcc

SEQ ID NO: 3747 - DNA, 20 bp, synthetic construct
  source 1..20: mol_type = other DNA
caggcctcgggaagcacctg

SEQ ID NO: 3748 - DNA, 20 bp, synthetic construct
  source 1..20: mol_type = other DNA
gcaggcctcgggaagcacct

SEQ ID NO: 3749 - DNA, 20 bp, synthetic construct
  source 1..20: mol_type = other DNA
agcaggcctcgggaagcacc

SEQ ID NO: 3750 - DNA, 20 bp, synthetic construct
  source 1..20: mol_type = other DNA
gagcaggcctcgggaagcac

SEQ ID NO: 3751 - DNA, 20 bp, synthetic construct
  source 1..20: mol_type = other DNA
cagaaaaagcaaccaaagca

SEQ ID NO: 3752 - DNA, 20 bp, synthetic construct
  source 1..20: mol_type = other DNA
gcagaaaaagcaaccaaagc

SEQ ID NO: 3753 - DNA, 20 bp, synthetic construct
  source 1..20: mol_type = other DNA
tgcagaaaaagcaaccaaag

SEQ ID NO: 3754 - DNA, 20 bp, synthetic construct
  source 1..20: mol_type = other DNA
ctgcagaaaaagcaaccaaa

SEQ ID NO: 3755 - DNA, 20 bp, synthetic construct
  source 1..20: mol_type = other DNA
acctgcagaaaaagcaacca

SEQ ID NO: 3756 - DNA, 20 bp, synthetic construct
  source 1..20: mol_type = other DNA
gacctgcagaaaaagcaacc

SEQ ID NO: 3757 - DNA, 20 bp, synthetic construct
  source 1..20: mol_type = other DNA
agacctgcagaaaaagcaac

SEQ ID NO: 3758 - DNA, 20 bp, synthetic construct
  source 1..20: mol_type = other DNA
cagacctgcagaaaaagcaa

SEQ ID NO: 3759 - DNA, 20 bp, synthetic construct
  source 1..20: mol_type = other DNA
acctaaggagtgagggtatc

SEQ ID NO: 3760 - DNA, 20 bp, synthetic construct
  source 1..20: mol_type = other DNA
aacctaaggagtgagggtat

SEQ ID NO: 3761 - DNA, 20 bp, synthetic construct
  source 1..20: mol_type = other DNA
caacctaaggagtgagggta

SEQ ID NO: 3762 - DNA, 20 bp, synthetic construct
  source 1..20: mol_type = other DNA
gcaacctaaggagtgagggt

SEQ ID NO: 3763 - DNA, 20 bp, synthetic construct
  source 1..20: mol_type = other DNA
tgcttgccaggtgagcttct

SEQ ID NO: 3764 - DNA, 20 bp, synthetic construct
  source 1..20: mol_type = other DNA
ttgcttgccaggtgagcttc

SEQ ID NO: 3765 - DNA, 20 bp, synthetic construct
  source 1..20: mol_type = other DNA
tttgcttgccaggtgagctt

SEQ ID NO: 3766 - DNA, 20 bp, synthetic construct
  source 1..20: mol_type = other DNA
ctttgcttgccaggtgagct

SEQ ID NO: 3767 - DNA, 20 bp, synthetic construct
  source 1..20: mol_type = other DNA
gtctttgcttgccaggtgag

SEQ ID NO: 3768 - DNA, 20 bp, synthetic construct
  source 1..20: mol_type = other DNA
ggtctttgcttgccaggtga

SEQ ID NO: 3769 - DNA, 20 bp, synthetic construct
  source 1..20: mol_type = other DNA
ccttgtattaaatactctaa

SEQ ID NO: 3770 - DNA, 20 bp, synthetic construct
  source 1..20: mol_type = other DNA
accttgtattaaatactcta

SEQ ID NO: 3771 - DNA, 20 bp, synthetic construct
  source 1..20: mol_type = other DNA
caccttgtattaaatactct

SEQ ID NO: 3772 - DNA, 20 bp, synthetic construct
  source 1..20: mol_type = other DNA
gcaccttgtattaaatactc

SEQ ID NO: 3773 - DNA, 20 bp, synthetic construct
  source 1..20: mol_type = other DNA
atgcaccttgtattaaatac

SEQ ID NO: 3774 - DNA, 20 bp, synthetic construct
  source 1..20: mol_type = other DNA
aatgcaccttgtattaaata

SEQ ID NO: 3775 - DNA, 20 bp, synthetic construct
  source 1..20: mol_type = other DNA
caatgcaccttgtattaaat

SEQ ID NO: 3776 - DNA, 20 bp, synthetic construct
  source 1..20: mol_type = other DNA
ccaatgcaccttgtattaaa

SEQ ID NO: 3777 - DNA, 20 bp, synthetic construct
  source 1..20: mol_type = other DNA
atccaatgcaccttgtatta

SEQ ID NO: 3778 - DNA, 20 bp, synthetic construct
  source 1..20: mol_type = other DNA
aatccaatgcaccttgtatt

SEQ ID NO: 3779 - DNA, 20 bp, synthetic construct
  source 1..20: mol_type = other DNA
aaatccaatgcaccttgtat

SEQ ID NO: 3780 - DNA, 20 bp, synthetic construct
  source 1..20: mol_type = other DNA
gaaatccaatgcaccttgta

SEQ ID NO: 3781 - DNA, 20 bp, synthetic construct
  source 1..20: mol_type = other DNA
ttgaaatccaatgcaccttg

SEQ ID NO: 3782 - DNA, 20 bp, synthetic construct
  source 1..20: mol_type = other DNA
tttgaaatccaatgcacctt

SEQ ID NO: 3783 - DNA, 20 bp, synthetic construct
  source 1..20: mol_type = other DNA
ctttgaaatccaatgcacct

SEQ ID NO: 3784 - DNA, 20 bp, synthetic construct
  source 1..20: mol_type = other DNA
cctttgaaatccaatgcacc

SEQ ID NO: 3785 - DNA, 20 bp, synthetic construct
  source 1..20: mol_type = other DNA
ttcctttgaaatccaatgca

SEQ ID NO: 3786 - DNA, 20 bp, synthetic construct
  source 1..20: mol_type = other DNA
tttcctttgaaatccaatgc

SEQ ID NO: 3787 - DNA, 20 bp, synthetic construct
  source 1..20: mol_type = other DNA
gtttcctttgaaatccaatg

SEQ ID NO: 3788 - DNA, 20 bp, synthetic construct
  source 1..20: mol_type = other DNA
agtttcctttgaaatccaat

SEQ ID NO: 3789 - DNA, 20 bp, synthetic construct
  source 1..20: mol_type = other DNA
ctgttactacatgtctaatc

SEQ ID NO: 3790 - DNA, 20 bp, synthetic construct
  source 1..20: mol_type = other DNA
cctgttactacatgtctaat

SEQ ID NO: 3791 - DNA, 20 bp, synthetic construct
  source 1..20: mol_type = other DNA
acctgttactacatgtctaa

SEQ ID NO: 3792 - DNA, 20 bp, synthetic construct
  source 1..20: mol_type = other DNA
cacctgttactacatgtcta

SEQ ID NO: 3793 - DNA, 20 bp, synthetic construct
  source 1..20: mol_type = other DNA
ggcacctgttactacatgtc

SEQ ID NO: 3794 - DNA, 20 bp, synthetic construct
  source 1..20: mol_type = other DNA
aggcacctgttactacatgt

SEQ ID NO: 3795 - DNA, 20 bp, synthetic construct
  source 1..20: mol_type = other DNA
aaggcacctgttactacatg

SEQ ID NO: 3796 - DNA, 20 bp, synthetic construct
  source 1..20: mol_type = other DNA
aaaggcacctgttactacat

SEQ ID NO: 3797 - DNA, 20 bp, synthetic construct
  source 1..20: mol_type = other DNA
atcacagaattatcagcagt

SEQ ID NO: 3798 - DNA, 20 bp, synthetic construct
  source 1..20: mol_type = other DNA
aatcacagaattatcagcag

SEQ ID NO: 3799 - DNA, 20 bp, synthetic construct
  source 1..20: mol_type = other DNA
aaatcacagaattatcagca

SEQ ID NO: 3800 - DNA, 20 bp, synthetic construct
  source 1..20: mol_type = other DNA
taaatcacagaattatcagc

SEQ ID NO: 3801 - DNA, 20 bp, synthetic construct
  source 1..20: mol_type = other DNA
cacacaatatccatggactt

SEQ ID NO: 3802 - DNA, 20 bp, synthetic construct
  source 1..20: mol_type = other DNA
acacacaatatccatggact

SEQ ID NO: 3803 - DNA, 20 bp, synthetic construct
  source 1..20: mol_type = other DNA
gacacacaatatccatggac

SEQ ID NO: 3804 - DNA, 20 bp, synthetic construct
  source 1..20: mol_type = other DNA
tgacacacaatatccatgga

SEQ ID NO: 3805 - DNA, 20 bp, synthetic construct
  source 1..20: mol_type = other DNA
cctgacacacaatatccatg

SEQ ID NO: 3806 - DNA, 20 bp, synthetic construct
  source 1..20: mol_type = other DNA
gcctgacacacaatatccat

SEQ ID NO: 3807 - DNA, 20 bp, synthetic construct
  source 1..20: mol_type = other DNA
agcctgacacacaatatcca

SEQ ID NO: 3808 - DNA, 20 bp, synthetic construct
  source 1..20: mol_type = other DNA
catgagaagcttagaaggcc

SEQ ID NO: 3809 - DNA, 20 bp, synthetic construct
  source 1..20: mol_type = other DNA
ctcatgagaagcttagaagg

SEQ ID NO: 3810 - DNA, 20 bp, synthetic construct
  source 1..20: mol_type = other DNA
gctcatgagaagcttagaag

SEQ ID NO: 3811 - DNA, 20 bp, synthetic construct
  source 1..20: mol_type = other DNA
gagctcatgagaagcttaga

SEQ ID NO: 3812 - DNA, 20 bp, synthetic construct
  source 1..20: mol_type = other DNA
tgagctcatgagaagcttag

SEQ ID NO: 3813 - DNA, 20 bp, synthetic construct
  source 1..20: mol_type = other DNA
ctgagctcatgagaagctta

SEQ ID NO: 3814 - DNA, 20 bp, synthetic construct
  source 1..20: mol_type = other DNA
gctgagctcatgagaagctt

SEQ ID NO: 3815 - DNA, 20 bp, synthetic construct
  source 1..20: mol_type = other DNA
ttgctgagctcatgagaagc

SEQ ID NO: 3816 - DNA, 20 bp, synthetic construct
  source 1..20: mol_type = other DNA
gttgctgagctcatgagaag

SEQ ID NO: 3817 - DNA, 20 bp, synthetic construct
  source 1..20: mol_type = other DNA
tgttgctgagctcatgagaa

SEQ ID NO: 3818 - DNA, 20 bp, synthetic construct
  source 1..20: mol_type = other DNA
ctgttgctgagctcatgaga

SEQ ID NO: 3819 - DNA, 20 bp, synthetic construct
  source 1..20: mol_type = other DNA
cactgttgctgagctcatga

SEQ ID NO: 3820 - DNA, 20 bp, synthetic construct
  source 1..20: mol_type = other DNA
ccactgttgctgagctcatg

SEQ ID NO: 3821 - DNA, 20 bp, synthetic construct
  source 1..20: mol_type = other DNA
accactgttgctgagctcat

SEQ ID NO: 3822 - DNA, 20 bp, synthetic construct
  source 1..20: mol_type = other DNA
aaccactgttgctgagctca

SEQ ID NO: 3823 - DNA, 20 bp, synthetic construct
  source 1..20: mol_type = other DNA
aaaaccactgttgctgagct

SEQ ID NO: 3824 - DNA, 20 bp, synthetic construct
  source 1..20: mol_type = other DNA
aaaaaccactgttgctgagc

SEQ ID NO: 3825 - DNA, 20 bp, synthetic construct
  source 1..20: mol_type = other DNA
taaaaaccactgttgctgag

SEQ ID NO: 3826 - DNA, 20 bp, synthetic construct
  source 1..20: mol_type = other DNA
gtaaaaaccactgttgctga

SEQ ID NO: 3827 - DNA, 20 bp, synthetic construct
  source 1..20: mol_type = other DNA
tctggttccatgctcttagg

SEQ ID NO: 3828 - DNA, 20 bp, synthetic construct
  source 1..20: mol_type = other DNA
ctctggttccatgctcttag

SEQ ID NO: 3829 - DNA, 20 bp, synthetic construct
  source 1..20: mol_type = other DNA
gctctggttccatgctctta

SEQ ID NO: 3830 - DNA, 20 bp, synthetic construct
  source 1..20: mol_type = other DNA
ggctctggttccatgctctt

SEQ ID NO: 3831 - DNA, 20 bp, synthetic construct
  source 1..20: mol_type = other DNA
caggctctggttccatgctc

SEQ ID NO: 3832 - DNA, 20 bp, synthetic construct
  source 1..20: mol_type = other DNA
acaggctctggttccatgct

SEQ ID NO: 3833 - DNA, 20 bp, synthetic construct
  source 1..20: mol_type = other DNA
aacaggctctggttccatgc

SEQ ID NO: 3834 - DNA, 20 bp, synthetic construct
  source 1..20: mol_type = other DNA
tgaactaaatccaccaaatg

SEQ ID NO: 3835 - DNA, 20 bp, synthetic construct
  source 1..20: mol_type = other DNA
atgaactaaatccaccaaat

SEQ ID NO: 3836 - DNA, 20 bp, synthetic construct
  source 1..20: mol_type = other DNA
gatgaactaaatccaccaaa

SEQ ID NO: 3837 - DNA, 20 bp, synthetic construct
  source 1..20: mol_type = other DNA
ggatgaactaaatccaccaa

SEQ ID NO: 3838 - DNA, 20 bp, synthetic construct
  source 1..20: mol_type = other DNA
aaggatgaactaaatccacc

SEQ ID NO: 3839 - DNA, 20 bp, synthetic construct
  source 1..20: mol_type = other DNA
aaaggatgaactaaatccac

SEQ ID NO: 3840 - DNA, 20 bp, synthetic construct
  source 1..20: mol_type = other DNA
aaaaggatgaactaaatcca

SEQ ID NO: 3841 - DNA, 20 bp, synthetic construct
  source 1..20: mol_type = other DNA
caaaaggatgaactaaatcc

SEQ ID NO: 3842 - DNA, 20 bp, synthetic construct
  source 1..20: mol_type = other DNA
agagactgaattctagcctg

SEQ ID NO: 3843 - DNA, 20 bp, synthetic construct
  source 1..20: mol_type = other DNA
cagagactgaattctagcct

SEQ ID NO: 3844 - DNA, 20 bp, synthetic construct
  source 1..20: mol_type = other DNA
ccagagactgaattctagcc

SEQ ID NO: 3845 - DNA, 20 bp, synthetic construct
  source 1..20: mol_type = other DNA
tccagagactgaattctagc

SEQ ID NO: 3846 - DNA, 20 bp, synthetic construct
  source 1..20: mol_type = other DNA
tatccagagactgaattcta

SEQ ID NO: 3847 - DNA, 20 bp, synthetic construct
  source 1..20: mol_type = other DNA
gtatccagagactgaattct

SEQ ID NO: 3848 - DNA, 20 bp, synthetic construct
  source 1..20: mol_type = other DNA
ggtatccagagactgaattc

SEQ ID NO: 3849 - DNA, 20 bp, synthetic construct
  source 1..20: mol_type = other DNA
gggtatccagagactgaatt

SEQ ID NO: 3850 - DNA, 20 bp, synthetic construct
  source 1..20: mol_type = other DNA
gtttaggctatggtctgagc

SEQ ID NO: 3851 - DNA, 20 bp, synthetic construct
  source 1..20: mol_type = other DNA
ggtttaggctatggtctgag

SEQ ID NO: 3852 - DNA, 20 bp, synthetic construct
  source 1..20: mol_type = other DNA
aggtttaggctatggtctga

SEQ ID NO: 3853 - DNA, 20 bp, synthetic construct
  source 1..20: mol_type = other DNA
gaggtttaggctatggtctg

SEQ ID NO: 3854 - DNA, 20 bp, synthetic construct
  source 1..20: mol_type = other DNA
atgaggtttaggctatggtc

SEQ ID NO: 3855 - DNA, 20 bp, synthetic construct
  source 1..20: mol_type = other DNA
ggatgctccaggtgggccag

SEQ ID NO: 3856 - DNA, 20 bp, synthetic construct
  source 1..20: mol_type = other DNA
tggatgctccaggtgggcca

SEQ ID NO: 3857 - DNA, 20 bp, synthetic construct
  source 1..20: mol_type = other DNA
gtggatgctccaggtgggcc

SEQ ID NO: 3858 - DNA, 20 bp, synthetic construct
  source 1..20: mol_type = other DNA
ggtggatgctccaggtgggc

SEQ ID NO: 3859 - DNA, 20 bp, synthetic construct
  source 1..20: mol_type = other DNA
gtctgcctgattccctttct

SEQ ID NO: 3860 - DNA, 20 bp, synthetic construct
  source 1..20: mol_type = other DNA
agtctgcctgattccctttc

SEQ ID NO: 3861 - DNA, 20 bp, synthetic construct
  source 1..20: mol_type = other DNA
cagtctgcctgattcccttt

SEQ ID NO: 3862 - DNA, 20 bp, synthetic construct
  source 1..20: mol_type = other DNA
gcagtctgcctgattccctt

SEQ ID NO: 3863 - DNA, 20 bp, synthetic construct
  source 1..20: mol_type = other DNA
cagcagtctgcctgattccc

SEQ ID NO: 3864 - DNA, 20 bp, synthetic construct
  source 1..20: mol_type = other DNA
tcagcagtctgcctgattcc

SEQ ID NO: 3865 - DNA, 20 bp, synthetic construct
  source 1..20: mol_type = other DNA
ttcagcagtctgcctgattc

SEQ ID NO: 3866 - DNA, 20 bp, synthetic construct
  source 1..20: mol_type = other DNA
gttcagcagtctgcctgatt

SEQ ID NO: 3867 - DNA, 20 bp, synthetic construct
  source 1..20: mol_type = other DNA
ctgttcagcagtctgcctga

SEQ ID NO: 3868 - DNA, 20 bp, synthetic construct
  source 1..20: mol_type = other DNA
actgttcagcagtctgcctg

SEQ ID NO: 3869 - DNA, 20 bp, synthetic construct
  source 1..20: mol_type = other DNA
tactgttcagcagtctgcct

SEQ ID NO: 3870 - DNA, 20 bp, synthetic construct
  source 1..20: mol_type = other DNA
ttactgttcagcagtctgcc

SEQ ID NO: 3871 - DNA, 20 bp, synthetic construct
  source 1..20: mol_type = other DNA
acttactgttcagcagtctg

SEQ ID NO: 3872 - DNA, 20 bp, synthetic construct
  source 1..20: mol_type = other DNA
tacttactgttcagcagtct

SEQ ID NO: 3873 - DNA, 20 bp, synthetic construct
  source 1..20: mol_type = other DNA
atacttactgttcagcagtc

SEQ ID NO: 3874 - DNA, 20 bp, synthetic construct
  source 1..20: mol_type = other DNA
catacttactgttcagcagt

SEQ ID NO: 3875 - DNA, 20 bp, synthetic construct
  source 1..20: mol_type = other DNA
gtcatacttactgttcagca

SEQ ID NO: 3876 - DNA, 20 bp, synthetic construct
  source 1..20: mol_type = other DNA
agtcatacttactgttcagc

SEQ ID NO: 3877 - DNA, 20 bp, synthetic construct
  source 1..20: mol_type = other DNA
aagtcatacttactgttcag

SEQ ID NO: 3878 - DNA, 20 bp, synthetic construct
  source 1..20: mol_type = other DNA
aaagtcatacttactgttca

SEQ ID NO: 3879 - DNA, 20 bp, synthetic construct
  source 1..20: mol_type = other DNA
tggtgaatagctatgtctaa

SEQ ID NO: 3880 - DNA, 20 bp, synthetic construct
  source 1..20: mol_type = other DNA
ttggtgaatagctatgtcta

SEQ ID NO: 3881 - DNA, 20 bp, synthetic construct
  source 1..20: mol_type = other DNA
cttggtgaatagctatgtct

SEQ ID NO: 3882 - DNA, 20 bp, synthetic construct
  source 1..20: mol_type = other DNA
gcttggtgaatagctatgtc

SEQ ID NO: 3883 - DNA, 20 bp, synthetic construct
  source 1..20: mol_type = other DNA
tagcttggtgaatagctatg

SEQ ID NO: 3884 - DNA, 20 bp, synthetic construct
  source 1..20: mol_type = other DNA
gtagcttggtgaatagctat

SEQ ID NO: 3885 - DNA, 20 bp, synthetic construct
  source 1..20: mol_type = other DNA
ggtagcttggtgaatagcta

SEQ ID NO: 3886 - DNA, 20 bp, synthetic construct
  source 1..20: mol_type = other DNA
agcctacaagagcctgttaa

SEQ ID NO: 3887 - DNA, 20 bp, synthetic construct
  source 1..20: mol_type = other DNA
cagcctacaagagcctgtta

SEQ ID NO: 3888 - DNA, 20 bp, synthetic construct
  source 1..20: mol_type = other DNA
gcagcctacaagagcctgtt

SEQ ID NO: 3889 - DNA, 20 bp, synthetic construct
  source 1..20: mol_type = other DNA
tgcagcctacaagagcctgt

SEQ ID NO: 3890 - DNA, 20 bp, synthetic construct
  source 1..20: mol_type = other DNA
tgtgcagcctacaagagcct

SEQ ID NO: 3891 - DNA, 20 bp, synthetic construct
  source 1..20: mol_type = other DNA
atgtgcagcctacaagagcc

SEQ ID NO: 3892 - DNA, 20 bp, synthetic construct
  source 1..20: mol_type = other DNA
catgtgcagcctacaagagc

SEQ ID NO: 3893 - DNA, 20 bp, synthetic construct
  source 1..20: mol_type = other DNA
gcatgtgcagcctacaagag

SEQ ID NO: 3894 - DNA, 20 bp, synthetic construct
  source 1..20: mol_type = other DNA
aagcatgtgcagcctacaag

SEQ ID NO: 3895 - DNA, 20 bp, synthetic construct
  source 1..20: mol_type = other DNA
gaagcatgtgcagcctacaa

SEQ ID NO: 3896 - DNA, 20 bp, synthetic construct
  source 1..20: mol_type = other DNA
ggaagcatgtgcagcctaca

SEQ ID NO: 3897 - DNA, 20 bp, synthetic construct
  source 1..20: mol_type = other DNA
gggaagcatgtgcagcctac

SEQ ID NO: 3898 - DNA, 20 bp, synthetic construct
  source 1..20: mol_type = other DNA
tagggaagcatgtgcagcct

SEQ ID NO: 3899 - DNA, 20 bp, synthetic construct
  source 1..20: mol_type = other DNA
ctagggaagcatgtgcagcc

SEQ ID NO: 3900 - DNA, 20 bp, synthetic construct
  source 1..20: mol_type = other DNA
tctagggaagcatgtgcagc

SEQ ID NO: 3901 - DNA, 20 bp, synthetic construct
  source 1..20: mol_type = other DNA
ttctagggaagcatgtgcag

SEQ ID NO: 3902 - DNA, 20 bp, synthetic construct
  source 1..20: mol_type = other DNA
gtttctagggaagcatgtgc

SEQ ID NO: 3903 - DNA, 20 bp, synthetic construct
  source 1..20: mol_type = other DNA
agtttctagggaagcatgtg

SEQ ID NO: 3904 - DNA, 20 bp, synthetic construct
  source 1..20: mol_type = other DNA
aagtttctagggaagcatgt

SEQ ID NO: 3905 - DNA, 20 bp, synthetic construct
  source 1..20: mol_type = other DNA
caagtttctagggaagcatg

SEQ ID NO: 3906 - DNA, 20 bp, synthetic construct
  source 1..20: mol_type = other DNA
tacaactctcttgttgggag

SEQ ID NO: 3907 - DNA, 20 bp, synthetic construct
  source 1..20: mol_type = other DNA
gtacaactctcttgttggga

SEQ ID NO: 3908 - DNA, 20 bp, synthetic construct
  source 1..20: mol_type = other DNA
ggtacaactctcttgttggg

SEQ ID NO: 3909 - DNA, 20 bp, synthetic construct
  source 1..20: mol_type = other DNA
gggtacaactctcttgttgg

SEQ ID NO: 3910 - DNA, 20 bp, synthetic construct
  source 1..20: mol_type = other DNA
cagggtacaactctcttgtt

SEQ ID NO: 3911 - DNA, 20 bp, synthetic construct
  source 1..20: mol_type = other DNA
acagggtacaactctcttgt

SEQ ID NO: 3912 - DNA, 20 bp, synthetic construct
  source 1..20: mol_type = other DNA
aacagggtacaactctcttg

SEQ ID NO: 3913 - DNA, 20 bp, synthetic construct
  source 1..20: mol_type = other DNA
aaacagggtacaactctctt

SEQ ID NO: 3914 - DNA, 20 bp, synthetic construct
  source 1..20: mol_type = other DNA
aaaaacagggtacaactctc

SEQ ID NO: 3915 - DNA, 20 bp, synthetic construct
  source 1..20: mol_type = other DNA
taaaaacagggtacaactct

SEQ ID NO: 3916 - DNA, 20 bp, synthetic construct
  source 1..20: mol_type = other DNA
ctaaaaacagggtacaactc

SEQ ID NO: 3917 - DNA, 20 bp, synthetic construct
  source 1..20: mol_type = other DNA
gctaaaaacagggtacaact

SEQ ID NO: 3918 - DNA, 20 bp, synthetic construct
  source 1..20: mol_type = other DNA
tgtagactctccatgagcct

SEQ ID NO: 3919 - DNA, 20 bp, synthetic construct
  source 1..20: mol_type = other DNA
atgtagactctccatgagcc

SEQ ID NO: 3920 - DNA, 20 bp, synthetic construct
  source 1..20: mol_type = other DNA
gatgtagactctccatgagc

SEQ ID NO: 3921 - DNA, 20 bp, synthetic construct
  source 1..20: mol_type = other DNA
ggatgtagactctccatgag

SEQ ID NO: 3922 - DNA, 20 bp, synthetic construct
  source 1..20: mol_type = other DNA
taagctaggcacacccaggg

SEQ ID NO: 3923 - DNA, 20 bp, synthetic construct
  source 1..20: mol_type = other DNA
ctaagctaggcacacccagg

SEQ ID NO: 3924 - DNA, 20 bp, synthetic construct
  source 1..20: mol_type = other DNA
actaagctaggcacacccag

SEQ ID NO: 3925 - DNA, 20 bp, synthetic construct
  source 1..20: mol_type = other DNA
cactaagctaggcacaccca

SEQ ID NO: 3926 - DNA, 20 bp, synthetic construct
  source 1..20: mol_type = other DNA
ggcactaagctaggcacacc

SEQ ID NO: 3927 - DNA, 20 bp, synthetic construct
  source 1..20: mol_type = other DNA
gtggcactaagctaggcaca

SEQ ID NO: 3928 - DNA, 20 bp, synthetic construct
  source 1..20: mol_type = other DNA
tgtggcactaagctaggcac

SEQ ID NO: 3929 - DNA, 20 bp, synthetic construct
  source 1..20: mol_type = other DNA
actgtggcactaagctaggc

SEQ ID NO: 3930 - DNA, 20 bp, synthetic construct
  source 1..20: mol_type = other DNA
tactgtggcactaagctagg

SEQ ID NO: 3931 - DNA, 20 bp, synthetic construct
  source 1..20: mol_type = other DNA
ttactgtggcactaagctag

SEQ ID NO: 3932 - DNA, 20 bp, synthetic construct
  source 1..20: mol_type = other DNA
tttactgtggcactaagcta

SEQ ID NO: 3933 - DNA, 20 bp, synthetic construct
  source 1..20: mol_type = other DNA
tgtttactgtggcactaagc

SEQ ID NO: 3934 - DNA, 20 bp, synthetic construct
  source 1..20: mol_type = other DNA
gtgtttactgtggcactaag

SEQ ID NO: 3935 - DNA, 20 bp, synthetic construct
  source 1..20: mol_type = other DNA
agtgtttactgtggcactaa

SEQ ID NO: 3936 - DNA, 20 bp, synthetic construct
  source 1..20: mol_type = other DNA
gagtgtttactgtggcacta

SEQ ID NO: 3937 - DNA, 20 bp, synthetic construct
  source 1..20: mol_type = other DNA
atggatactcagaagagcag

SEQ ID NO: 3938 - DNA, 20 bp, synthetic construct
  source 1..20: mol_type = other DNA
gatggatactcagaagagca

SEQ ID NO: 3939 - DNA, 20 bp, synthetic construct
  source 1..20: mol_type = other DNA
acctcagggctggcccaaag

SEQ ID NO: 3940 - DNA, 20 bp, synthetic construct
  source 1..20: mol_type = other DNA
gacctcagggctggcccaaa

SEQ ID NO: 3941 - DNA, 20 bp, synthetic construct
  source 1..20: mol_type = other DNA
ggacctcagggctggcccaa

SEQ ID NO: 3942 - DNA, 20 bp, synthetic construct
  source 1..20: mol_type = other DNA
aggacctcagggctggccca

SEQ ID NO: 3943 - DNA, 20 bp, synthetic construct
  source 1..20: mol_type = other DNA
tcaggacctcagggctggcc

SEQ ID NO: 3944 - DNA, 20 bp, synthetic construct
  source 1..20: mol_type = other DNA
gtcaggacctcagggctggc

SEQ ID NO: 3945 - DNA, 20 bp, synthetic construct
  source 1..20: mol_type = other DNA
tgtcaggacctcagggctgg

SEQ ID NO: 3946 - DNA, 20 bp, synthetic construct
  source 1..20: mol_type = other DNA
ctgtcaggacctcagggctg

SEQ ID NO: 3947 - DNA, 20 bp, synthetic construct
  source 1..20: mol_type = other DNA
gagttatcctcaattcacca

SEQ ID NO: 3948 - DNA, 20 bp, synthetic construct
  source 1..20: mol_type = other DNA
agagttatcctcaattcacc

SEQ ID NO: 3949 - DNA, 20 bp, synthetic construct
  source 1..20: mol_type = other DNA
ccagagttatcctcaattca

SEQ ID NO: 3950 - DNA, 20 bp, synthetic construct
  source 1..20: mol_type = other DNA
tgccagagttatcctcaatt

SEQ ID NO: 3951 - DNA, 20 bp, synthetic construct
  source 1..20: mol_type = other DNA
ctgccagagttatcctcaat

SEQ ID NO: 3952 - DNA, 20 bp, synthetic construct
  source 1..20: mol_type = other DNA
cctgccagagttatcctcaa

SEQ ID NO: 3953 - DNA, 20 bp, synthetic construct
  source 1..20: mol_type = other DNA
tcctgccagagttatcctca

SEQ ID NO: 3954 - DNA, 20 bp, synthetic construct
  source 1..20: mol_type = other DNA
gatcctgccagagttatcct

SEQ ID NO: 3955 - DNA, 20 bp, synthetic construct
  source 1..20: mol_type = other DNA
ggatcctgccagagttatcc

SEQ ID NO: 3956 - DNA, 20 bp, synthetic construct
  source 1..20: mol_type = other DNA
aggatcctgccagagttatc

SEQ ID NO: 3957 - DNA, 20 bp, synthetic construct
  source 1..20: mol_type = other DNA
caggatcctgccagagttat

SEQ ID NO: 3958 - DNA, 20 bp, synthetic construct
  source 1..20: mol_type = other DNA
cagcaaatatacaccaccct

SEQ ID NO: 3959 - DNA, 20 bp, synthetic construct
  source 1..20: mol_type = other DNA
acagcaaatatacaccaccc

SEQ ID NO: 3960 - DNA, 20 bp, synthetic construct
  source 1..20: mol_type = other DNA
aacagcaaatatacaccacc

SEQ ID NO: 3961 - DNA, 20 bp, synthetic construct
  source 1..20: mol_type = other DNA
caacagcaaatatacaccac

SEQ ID NO: 3962 - DNA, 20 bp, synthetic construct
  source 1..20: mol_type = other DNA
cacaacagcaaatatacacc

SEQ ID NO: 3963 - DNA, 20 bp, synthetic construct
  source 1..20: mol_type = other DNA
tcacaacagcaaatatacac

SEQ ID NO: 3964 - DNA, 20 bp, synthetic construct
  source 1..20: mol_type = other DNA
ctcacaacagcaaatataca

SEQ ID NO: 3965 - DNA, 20 bp, synthetic construct
  source 1..20: mol_type = other DNA
actcacaacagcaaatatac

SEQ ID NO: 3966 - DNA, 20 bp, synthetic construct
  source 1..20: mol_type = other DNA
tgactcacaacagcaaatat

SEQ ID NO: 3967 - DNA, 20 bp, synthetic construct
  source 1..20: mol_type = other DNA
ctgactcacaacagcaaata

SEQ ID NO: 3968 - DNA, 20 bp, synthetic construct
  source 1..20: mol_type = other DNA
actgactcacaacagcaaat

SEQ ID NO: 3969 - DNA, 20 bp, synthetic construct
  source 1..20: mol_type = other DNA
cactgactcacaacagcaaa

SEQ ID NO: 3970 - DNA, 20 bp, synthetic construct
  source 1..20: mol_type = other DNA
gtcactgactcacaacagca

SEQ ID NO: 3971 - DNA, 20 bp, synthetic construct
  source 1..20: mol_type = other DNA
agtcactgactcacaacagc

SEQ ID NO: 3972 - DNA, 20 bp, synthetic construct
  source 1..20: mol_type = other DNA
cagtcactgactcacaacag

SEQ ID NO: 3973 - DNA, 20 bp, synthetic construct
  source 1..20: mol_type = other DNA
tcagtcactgactcacaaca

SEQ ID NO: 3974 - DNA, 20 bp, synthetic construct
  source 1..20: mol_type = other DNA
tctcagtcactgactcacaa

SEQ ID NO: 3975 - DNA, 20 bp, synthetic construct
  source 1..20: mol_type = other DNA
atctcagtcactgactcaca

SEQ ID NO: 3976 - DNA, 20 bp, synthetic construct
  source 1..20: mol_type = other DNA
gatctcagtcactgactcac

SEQ ID NO: 3977 - DNA, 20 bp, synthetic construct
  source 1..20: mol_type = other DNA
ggatctcagtcactgactca

SEQ ID NO: 3978 - DNA, 20 bp, synthetic construct
  source 1..20: mol_type = other DNA
ggttacccagccactgcccc

SEQ ID NO: 3979 - DNA, 20 bp, synthetic construct
  source 1..20: mol_type = other DNA
gggttacccagccactgccc

SEQ ID NO: 3980 - DNA, 20 bp, synthetic construct
  source 1..20: mol_type = other DNA
agggttacccagccactgcc

SEQ ID NO: 3981 - DNA, 20 bp, synthetic construct
  source 1..20: mol_type = other DNA
cagggttacccagccactgc

SEQ ID NO: 3982 - DNA, 20 bp, synthetic construct
  source 1..20: mol_type = other DNA
tgcagggttacccagccact

SEQ ID NO: 3983 - DNA, 20 bp, synthetic construct
  source 1..20: mol_type = other DNA
atgcagggttacccagccac

SEQ ID NO: 3984 - DNA, 20 bp, synthetic construct
  source 1..20: mol_type = other DNA
gatgcagggttacccagcca

SEQ ID NO: 3985 - DNA, 20 bp, synthetic construct
  source 1..20: mol_type = other DNA
ggatgcagggttacccagcc

SEQ ID NO: 3986 - DNA, 20 bp, synthetic construct
  source 1..20: mol_type = other DNA
aaggatgcagggttacccag

SEQ ID NO: 3987 - DNA, 20 bp, synthetic construct
  source 1..20: mol_type = other DNA
gaaggatgcagggttaccca

SEQ ID NO: 3988 - DNA, 20 bp, synthetic construct
  source 1..20: mol_type = other DNA
tgaaggatgcagggttaccc

SEQ ID NO: 3989 - DNA, 20 bp, synthetic construct
  source 1..20: mol_type = other DNA
gtgaaggatgcagggttacc

SEQ ID NO: 3990 - DNA, 20 bp, synthetic construct
  source 1..20: mol_type = other DNA
atcttcattacatgattact

SEQ ID NO: 3991 - DNA, 20 bp, synthetic construct
  source 1..20: mol_type = other DNA
gatcttcattacatgattac

SEQ ID NO: 3992 - DNA, 20 bp, synthetic construct
  source 1..20: mol_type = other DNA
agatcttcattacatgatta

SEQ ID NO: 3993 - DNA, 20 bp, synthetic construct
  source 1..20: mol_type = other DNA
cagatcttcattacatgatt

SEQ ID NO: 3994 - DNA, 20 bp, synthetic construct
  source 1..20: mol_type = other DNA
ggcagatcttcattacatga

SEQ ID NO: 3995 - DNA, 20 bp, synthetic construct
  source 1..20: mol_type = other DNA
atggacaggtgattctaagc

SEQ ID NO: 3996 - DNA, 20 bp, synthetic construct
  source 1..20: mol_type = other DNA
gatggacaggtgattctaag

SEQ ID NO: 3997 - DNA, 20 bp, synthetic construct
  source 1..20: mol_type = other DNA
cagatggacaggtgattcta

SEQ ID NO: 3998 - DNA, 20 bp, synthetic construct
  source 1..20: mol_type = other DNA
ggcagatggacaggtgattc

SEQ ID NO: 3999 - DNA, 20 bp, synthetic construct
  source 1..20: mol_type = other DNA
aggcagatggacaggtgatt

SEQ ID NO: 4000 - DNA, 20 bp, synthetic construct
  source 1..20: mol_type = other DNA
gaggcagatggacaggtgat

SEQ ID NO: 4001 - DNA, 20 bp, synthetic construct
  source 1..20: mol_type = other DNA
tgaggcagatggacaggtga

SEQ ID NO: 4002 - DNA, 20 bp, synthetic construct
  source 1..20: mol_type = other DNA
gtgaccttgggatagtccct

SEQ ID NO: 4003 - DNA, 20 bp, synthetic construct
  source 1..20: mol_type = other DNA
tgtgaccttgggatagtccc

SEQ ID NO: 4004 - DNA, 20 bp, synthetic construct
  source 1..20: mol_type = other DNA
ttgtgaccttgggatagtcc

SEQ ID NO: 4005 - DNA, 20 bp, synthetic construct
  source 1..20: mol_type = other DNA
tttgtgaccttgggatagtc

SEQ ID NO: 4006 - DNA, 20 bp, synthetic construct
  source 1..20: mol_type = other DNA
gagcaaaggcttgcttaagt

SEQ ID NO: 4007 - DNA, 20 bp, synthetic construct
  source 1..20: mol_type = other DNA
agagcaaaggcttgcttaag

SEQ ID NO: 4008 - DNA, 20 bp, synthetic construct
  source 1..20: mol_type = other DNA
aagagcaaaggcttgcttaa

SEQ ID NO: 4009 - DNA, 20 bp, synthetic construct
  source 1..20: mol_type = other DNA
gaagagcaaaggcttgctta

SEQ ID NO: 4010 - DNA, 20 bp, synthetic construct
  source 1..20: mol_type = other DNA
cagaagagcaaaggcttgct

SEQ ID NO: 4011 - DNA, 20 bp, synthetic construct
  source 1..20: mol_type = other DNA
acagaagagcaaaggcttgc

SEQ ID NO: 4012 - DNA, 20 bp, synthetic construct
  source 1..20: mol_type = other DNA
cacagaagagcaaaggcttg

SEQ ID NO: 4013 - DNA, 20 bp, synthetic construct
  source 1..20: mol_type = other DNA
ccacagaagagcaaaggctt

SEQ ID NO: 4014 - DNA, 20 bp, synthetic construct
  source 1..20: mol_type = other DNA
acccacagaagagcaaaggc

SEQ ID NO: 4015 - DNA, 20 bp, synthetic construct
  source 1..20: mol_type = other DNA
gacccacagaagagcaaagg

SEQ ID NO: 4016 - DNA, 20 bp, synthetic construct
  source 1..20: mol_type = other DNA
agacccacagaagagcaaag

SEQ ID NO: 4017 - DNA, 20 bp, synthetic construct
  source 1..20: mol_type = other DNA
cagacccacagaagagcaaa

SEQ ID NO: 4018 - DNA, 20 bp, synthetic construct
  source 1..20: mol_type = other DNA
atgcccttgctgtaggaccc

SEQ ID NO: 4019 - DNA, 20 bp, synthetic construct
  source 1..20: mol_type = other DNA
aatgcccttgctgtaggacc

SEQ ID NO: 4020 - DNA, 20 bp, synthetic construct
  source 1..20: mol_type = other DNA
caatgcccttgctgtaggac

SEQ ID NO: 4021 - DNA, 20 bp, synthetic construct
  source 1..20: mol_type = other DNA
tcaatgcccttgctgtagga

SEQ ID NO: 4022 - DNA, 20 bp, synthetic construct
  source 1..20: mol_type = other DNA
ttagctctcagtgaagctgg

SEQ ID NO: 4023 - DNA, 20 bp, synthetic construct
  source 1..20: mol_type = other DNA
aacagcagcagtctaatcca

SEQ ID NO: 4024 - DNA, 20 bp, synthetic construct
  source 1..20: mol_type = other DNA
aaacagcagcagtctaatcc

SEQ ID NO: 4025 - DNA, 20 bp, synthetic construct
  source 1..20: mol_type = other DNA
gaaacagcagcagtctaatc

SEQ ID NO: 4026 - DNA, 20 bp, synthetic construct
  source 1..20: mol_type = other DNA
ggaaacagcagcagtctaat

SEQ ID NO: 4027 - DNA, 20 bp, synthetic construct
  source 1..20: mol_type = other DNA
aactctcagctactccccaa

SEQ ID NO: 4028 - DNA, 20 bp, synthetic construct
  source 1..20: mol_type = other DNA
caactctcagctactcccca

SEQ ID NO: 4029 - DNA, 20 bp, synthetic construct
  source 1..20: mol_type = other DNA
ccaactctcagctactcccc

SEQ ID NO: 4030 - DNA, 20 bp, synthetic construct
  source 1..20: mol_type = other DNA
accaactctcagctactccc

SEQ ID NO: 4031 - DNA, 20 bp, synthetic construct
  source 1..20: mol_type = other DNA
gcaaacagattaaagttgct

SEQ ID NO: 4032 - DNA, 20 bp, synthetic construct
  source 1..20: mol_type = other DNA
ggcaaacagattaaagttgc

SEQ ID NO: 4033 - DNA, 20 bp, synthetic construct
  source 1..20: mol_type = other DNA
cacctgagtgctgcaaagtg

SEQ ID NO: 4034 - DNA, 20 bp, synthetic construct
  source 1..20: mol_type = other DNA
ccacctgagtgctgcaaagt

SEQ ID NO: 4035 - DNA, 20 bp, synthetic construct
  source 1..20: mol_type = other DNA
cccacctgagtgctgcaaag

SEQ ID NO: 4036 - DNA, 20 bp, synthetic construct
  source 1..20: mol_type = other DNA
tcccacctgagtgctgcaaa

SEQ ID NO: 4037 - DNA, 20 bp, synthetic construct
  source 1..20: mol_type = other DNA
actcccacctgagtgctgca

SEQ ID NO: 4038 - DNA, 20 bp, synthetic construct
  source 1..20: mol_type = other DNA
cactcccacctgagtgctgc

SEQ ID NO: 4039 - DNA, 20 bp, synthetic construct
  source 1..20: mol_type = other DNA
acactcccacctgagtgctg

SEQ ID NO: 4040 - DNA, 20 bp, synthetic construct
  source 1..20: mol_type = other DNA
gacactcccacctgagtgct

SEQ ID NO: 4041 - DNA, 20 bp, synthetic construct
  source 1..20: mol_type = other DNA
tttttggctgccctgcctca

SEQ ID NO: 4042 - DNA, 20 bp, synthetic construct
  source 1..20: mol_type = other DNA
ctttttggctgccctgcctc

SEQ ID NO: 4043 - DNA, 20 bp, synthetic construct
  source 1..20: mol_type = other DNA
tctttttggctgccctgcct

SEQ ID NO: 4044 - DNA, 20 bp, synthetic construct
  source 1..20: mol_type = other DNA
gtctttttggctgccctgcc

SEQ ID NO: 4045 - DNA, 20 bp, synthetic construct
  source 1..20: mol_type = other DNA
tggtctttttggctgccctg

SEQ ID NO: 4046 - DNA, 20 bp, synthetic construct
  source 1..20: mol_type = other DNA
ttggtctttttggctgccct

SEQ ID NO: 4047 - DNA, 20 bp, synthetic construct
  source 1..20: mol_type = other DNA
gttggtctttttggctgccc

SEQ ID NO: 4048 - DNA, 20 bp, synthetic construct
  source 1..20: mol_type = other DNA
cgttggtctttttggctgcc

SEQ ID NO: 4049 - DNA, 20 bp, synthetic construct
  source 1..20: mol_type = other DNA
cttatctttgtccacatatc

SEQ ID NO: 4050 - DNA, 20 bp, synthetic construct
  source 1..20: mol_type = other DNA
ccttatctttgtccacatat

SEQ ID NO: 4051 - DNA, 20 bp, synthetic construct
  source 1..20: mol_type = other DNA
accttatctttgtccacata

SEQ ID NO: 4052 - DNA, 20 bp, synthetic construct
  source 1..20: mol_type = other DNA
taccttatctttgtccacat

SEQ ID NO: 4053 - DNA, 20 bp, synthetic construct
  source 1..20: mol_type = other DNA
aataccttatctttgtccac

SEQ ID NO: 4054 - DNA, 20 bp, synthetic construct
  source 1..20: mol_type = other DNA
aaataccttatctttgtcca

SEQ ID NO: 4055 - DNA, 20 bp, synthetic construct
  source 1..20: mol_type = other DNA
taaataccttatctttgtcc

SEQ ID NO: 4056 - DNA, 20 bp, synthetic construct
  source 1..20: mol_type = other DNA
ataaataccttatctttgtc

SEQ ID NO: 4057 - DNA, 20 bp, synthetic construct
  source 1..20: mol_type = other DNA
caataaataccttatctttg

SEQ ID NO: 4058 - DNA, 20 bp, synthetic construct
  source 1..20: mol_type = other DNA
tcaataaataccttatcttt

SEQ ID NO: 4059 - DNA, 20 bp, synthetic construct
  source 1..20: mol_type = other DNA
ttcaataaataccttatctt

SEQ ID NO: 4060 - DNA, 20 bp, synthetic construct
  source 1..20: mol_type = other DNA
cttcaataaataccttatct

SEQ ID NO: 4061 - DNA, 20 bp, synthetic construct
  source 1..20: mol_type = other DNA
tgcttcaataaataccttat

SEQ ID NO: 4062 - DNA, 20 bp, synthetic construct
  source 1..20: mol_type = other DNA
atgcttcaataaatacctta

SEQ ID NO: 4063 - DNA, 20 bp, synthetic construct
  source 1..20: mol_type = other DNA
aatgcttcaataaatacctt

SEQ ID NO: 4064 - DNA, 20 bp, synthetic construct
  source 1..20: mol_type = other DNA
taatgcttcaataaatacct

SEQ ID NO: 4065 - DNA, 20 bp, synthetic construct
  source 1..20: mol_type = other DNA
ttagaagtaatgcttcaata

SEQ ID NO: 4066 - DNA, 20 bp, synthetic construct
  source 1..20: mol_type = other DNA
cttagaagtaatgcttcaat

SEQ ID NO: 4067 - DNA, 20 bp, synthetic construct
  source 1..20: mol_type = other DNA
tcttagaagtaatgcttcaa

SEQ ID NO: 4068 - DNA, 20 bp, synthetic construct
  source 1..20: mol_type = other DNA
ctcttagaagtaatgcttca

SEQ ID NO: 4069 - DNA, 20 bp, synthetic construct
  source 1..20: mol_type = other DNA
ccctcttagaagtaatgctt

SEQ ID NO: 4070 - DNA, 20 bp, synthetic construct
  source 1..20: mol_type = other DNA
tccctcttagaagtaatgct

SEQ ID NO: 4071 - DNA, 20 bp, synthetic construct
  source 1..20: mol_type = other DNA
ttccctcttagaagtaatgc

SEQ ID NO: 4072 - DNA, 20 bp, synthetic construct
  source 1..20: mol_type = other DNA
tttccctcttagaagtaatg

SEQ ID NO: 4073 - DNA, 20 bp, synthetic construct
  source 1..20: mol_type = other DNA
gctaatgatacaaggttgtt

SEQ ID NO: 4074 - DNA, 20 bp, synthetic construct
  source 1..20: mol_type = other DNA
agctaatgatacaaggttgt

SEQ ID NO: 4075 - DNA, 20 bp, synthetic construct
  source 1..20: mol_type = other DNA
gcagctaatgatacaaggtt

SEQ ID NO: 4076 - DNA, 20 bp, synthetic construct
  source 1..20: mol_type = other DNA
atgcagctaatgatacaagg

SEQ ID NO: 4077 - DNA, 20 bp, synthetic construct
  source 1..20: mol_type = other DNA
aatgcagctaatgatacaag

SEQ ID NO: 4078 - DNA, 20 bp, synthetic construct
  source 1..20: mol_type = other DNA
aaatgcagctaatgatacaa

SEQ ID NO: 4079 - DNA, 20 bp, synthetic construct
  source 1..20: mol_type = other DNA
aaaatgcagctaatgataca

SEQ ID NO: 4080 - DNA, 20 bp, synthetic construct
  source 1..20: mol_type = other DNA
aagagttacctcctccctgg

SEQ ID NO: 4081 - DNA, 20 bp, synthetic construct
  source 1..20: mol_type = other DNA
caagagttacctcctccctg

SEQ ID NO: 4082 - DNA, 20 bp, synthetic construct
  source 1..20: mol_type = other DNA
gcaagagttacctcctccct

SEQ ID NO: 4083 - DNA, 20 bp, synthetic construct
  source 1..20: mol_type = other DNA
tgcaagagttacctcctccc

SEQ ID NO: 4084 - DNA, 20 bp, synthetic construct
  source 1..20: mol_type = other DNA
ttctactcaaaaatatacat

SEQ ID NO: 4085 - DNA, 20 bp, synthetic construct
  source 1..20: mol_type = other DNA
atgagtaagggtattctgct

SEQ ID NO: 4086 - DNA, 20 bp, synthetic construct
  source 1..20: mol_type = other DNA
aatgagtaagggtattctgc

SEQ ID NO: 4087 - DNA, 20 bp, synthetic construct
  source 1..20: mol_type = other DNA
caatgagtaagggtattctg

SEQ ID NO: 4088 - DNA, 20 bp, synthetic construct
  source 1..20: mol_type = other DNA
acaatgagtaagggtattct

SEQ ID NO: 4089 - DNA, 20 bp, synthetic construct
  source 1..20: mol_type = other DNA
cagccctgtgccagccagcc

SEQ ID NO: 4090 - DNA, 20 bp, synthetic construct
  source 1..20: mol_type = other DNA
acagccctgtgccagccagc

SEQ ID NO: 4091 - DNA, 20 bp, synthetic construct
  source 1..20: mol_type = other DNA
gacagccctgtgccagccag

SEQ ID NO: 4092 - DNA, 20 bp, synthetic construct
  source 1..20: mol_type = other DNA
cgacagccctgtgccagcca

SEQ ID NO: 4093 - DNA, 20 bp, synthetic construct
  source 1..20: mol_type = other DNA
actttcccacagtcagctgg

SEQ ID NO: 4094 - DNA, 20 bp, synthetic construct
  source 1..20: mol_type = other DNA
aactttcccacagtcagctg

SEQ ID NO: 4095 - DNA, 20 bp, synthetic construct
  source 1..20: mol_type = other DNA
aaactttcccacagtcagct

SEQ ID NO: 4096 - DNA, 20 bp, synthetic construct
  source 1..20: mol_type = other DNA
gaaactttcccacagtcagc

SEQ ID NO: 4097 - DNA, 20 bp, synthetic construct
  source 1..20: mol_type = other DNA
tggaaactttcccacagtca

SEQ ID NO: 4098 - DNA, 20 bp, synthetic construct
  source 1..20: mol_type = other DNA
atggaaactttcccacagtc

SEQ ID NO: 4099 - DNA, 20 bp, synthetic construct
  source 1..20: mol_type = other DNA
aatggaaactttcccacagt

SEQ ID NO: 4100 - DNA, 20 bp, synthetic construct
  source 1..20: mol_type = other DNA
aaatggaaactttcccacag

SEQ ID NO: 4101 - DNA, 20 bp, synthetic construct
  source 1..20: mol_type = other DNA
aaatccaacccttgtcactc

SEQ ID NO: 4102 - DNA, 20 bp, synthetic construct
  source 1..20: mol_type = other DNA
caaatccaacccttgtcact

SEQ ID NO: 4103 - DNA, 20 bp, synthetic construct
  source 1..20: mol_type = other DNA
tcaaatccaacccttgtcac

SEQ ID NO: 4104 - DNA, 20 bp, synthetic construct
  source 1..20: mol_type = other DNA
ctcaaatccaacccttgtca

SEQ ID NO: 4105 - DNA, 20 bp, synthetic construct
  source 1..20: mol_type = other DNA
tggatgtgtcatttcccctg

SEQ ID NO: 4106 - DNA, 20 bp, synthetic construct
  source 1..20: mol_type = other DNA
agtgcaagagttacctcctc

SEQ ID NO: 4107 - DNA, 20 bp, synthetic construct
  source 1..20: mol_type = other DNA
cagtgcaagagttacctcct

SEQ ID NO: 4108 - DNA, 20 bp, synthetic construct
  source 1..20: mol_type = other DNA
gcagtgcaagagttacctcc

SEQ ID NO: 4109 - DNA, 20 bp, synthetic construct
  source 1..20: mol_type = other DNA
agcagtgcaagagttacctc

SEQ ID NO: 4110 - DNA, 20 bp, synthetic construct
  source 1..20: mol_type = other DNA
atcagttagcagtgcaagag

SEQ ID NO: 4111 - DNA, 20 bp, synthetic construct
  source 1..20: mol_type = other DNA
tatcagttagcagtgcaaga

SEQ ID NO: 4112 - DNA, 20 bp, synthetic construct
  source 1..20: mol_type = other DNA
ctatcagttagcagtgcaag

SEQ ID NO: 4113 - DNA, 20 bp, synthetic construct
  source 1..20: mol_type = other DNA
cctatcagttagcagtgcaa

SEQ ID NO: 4114 - DNA, 20 bp, synthetic construct
  source 1..20: mol_type = other DNA
ttcctatcagttagcagtgc

SEQ ID NO: 4115 - DNA, 20 bp, synthetic construct
  source 1..20: mol_type = other DNA
attcctatcagttagcagtg

SEQ ID NO: 4116 - DNA, 20 bp, synthetic construct
  source 1..20: mol_type = other DNA
aattcctatcagttagcagt

SEQ ID NO: 4117 - DNA, 20 bp, synthetic construct
  source 1..20: mol_type = other DNA
taattcctatcagttagcag

SEQ ID NO: 4118 - DNA, 20 bp, synthetic construct
  source 1..20: mol_type = other DNA
tctatgctgcagtcatatta

SEQ ID NO: 4119 - DNA, 20 bp, synthetic construct
  source 1..20: mol_type = other DNA
gtctatgctgcagtcatatt

SEQ ID NO: 4120 - DNA, 20 bp, synthetic construct
  source 1..20: mol_type = other DNA
ggtctatgctgcagtcatat

SEQ ID NO: 4121 - DNA, 20 bp, synthetic construct
  source 1..20: mol_type = other DNA
aggtctatgctgcagtcata

SEQ ID NO: 4122 - DNA, 20 bp, synthetic construct
  source 1..20: mol_type = other DNA
acaggtctatgctgcagtca

SEQ ID NO: 4123 - DNA, 20 bp, synthetic construct
  source 1..20: mol_type = other DNA
gacaggtctatgctgcagtc

SEQ ID NO: 4124 - DNA, 20 bp, synthetic construct
  source 1..20: mol_type = other DNA
tgacaggtctatgctgcagt

SEQ ID NO: 4125 - DNA, 20 bp, synthetic construct
  source 1..20: mol_type = other DNA
ctgacaggtctatgctgcag

SEQ ID NO: 4126 - DNA, 20 bp, synthetic construct
  source 1..20: mol_type = other DNA
cactcttctgacaggtctat

SEQ ID NO: 4127 - DNA, 20 bp, synthetic construct
  source 1..20: mol_type = other DNA
ccactcttctgacaggtcta

SEQ ID NO: 4128 - DNA, 20 bp, synthetic construct
  source 1..20: mol_type = other DNA
tccactcttctgacaggtct

SEQ ID NO: 4129 - DNA, 20 bp, synthetic construct
  source 1..20: mol_type = other DNA
ttccactcttctgacaggtc

SEQ ID NO: 4130 - DNA, 20 bp, synthetic construct
  source 1..20: mol_type = other DNA
ttttccactcttctgacagg

SEQ ID NO: 4131 - DNA, 20 bp, synthetic construct
  source 1..20: mol_type = other DNA
gttttccactcttctgacag

SEQ ID NO: 4132 - DNA, 20 bp, synthetic construct
  source 1..20: mol_type = other DNA
tgttttccactcttctgaca

SEQ ID NO: 4133 - DNA, 20 bp, synthetic construct
  source 1..20: mol_type = other DNA
atctcttccatctccactgc

SEQ ID NO: 4134 - DNA, 20 bp, synthetic construct
  source 1..20: mol_type = other DNA
catctcttccatctccactg

SEQ ID NO: 4135 - DNA, 20 bp, synthetic construct
  source 1..20: mol_type = other DNA
acatctcttccatctccact

SEQ ID NO: 4136 - DNA, 20 bp, synthetic construct
  source 1..20: mol_type = other DNA
cacatctcttccatctccac

SEQ ID NO: 4137 - DNA, 20 bp, synthetic construct
  source 1..20: mol_type = other DNA
tgcacatctcttccatctcc

SEQ ID NO: 4138 - DNA, 20 bp, synthetic construct
  source 1..20: mol_type = other DNA
atgcacatctcttccatctc

SEQ ID NO: 4139 - DNA, 20 bp, synthetic construct
  source 1..20: mol_type = other DNA
catgcacatctcttccatct

SEQ ID NO: 4140 - DNA, 20 bp, synthetic construct
  source 1..20: mol_type = other DNA
tcatgcacatctcttccatc

SEQ ID NO: 4141 - DNA, 17 bp, synthetic construct
  source 1..17: mol_type = other DNA
ccacagggccctttcca

SEQ ID NO: 4142 - DNA, 17 bp, synthetic construct
  source 1..17: mol_type = other DNA
gccacagggccctttcc

SEQ ID NO: 4143 - DNA, 17 bp, synthetic construct
  source 1..17: mol_type = other DNA
gttctcgaatatcccta

SEQ ID NO: 4144 - DNA, 17 bp, synthetic construct
  source 1..17: mol_type = other DNA
agttctcgaatatccct

SEQ ID NO: 4145 - DNA, 17 bp, synthetic construct
  source 1..17: mol_type = other DNA
gagttctcgaatatccc

SEQ ID NO: 4146 - DNA, 17 bp, synthetic construct
  source 1..17: mol_type = other DNA
ggagttctcgaatatcc

SEQ ID NO: 4147 - DNA, 17 bp, synthetic construct
  source 1..17: mol_type = other DNA
aggagttctcgaatatc

SEQ ID NO: 4148 - DNA, 17 bp, synthetic construct
  source 1..17: mol_type = other DNA
gaggagttctcgaatat

SEQ ID NO: 4149 - DNA, 17 bp, synthetic construct
  source 1..17: mol_type = other DNA
ggtcctctccgctgcct

SEQ ID NO: 4150 - DNA, 17 bp, synthetic construct
  source 1..17: mol_type = other DNA
gggtcctctccgctgcc

SEQ ID NO: 4151 - DNA, 17 bp, synthetic construct
  source 1..17: mol_type = other DNA
agggtcctctccgctgc

SEQ ID NO: 4152 - DNA, 17 bp, synthetic construct
  source 1..17: mol_type = other DNA
ttcactgaggacctcag

SEQ ID NO: 4153 - DNA, 17 bp, synthetic construct
  source 1..17: mol_type = other DNA
attcactgaggacctca

SEQ ID NO: 4154 - DNA, 17 bp, synthetic construct
  source 1..17: mol_type = other DNA
gattcactgaggacctc

SEQ ID NO: 4155 - DNA, 17 bp, synthetic construct
  source 1..17: mol_type = other DNA
cgattcactgaggacct

SEQ ID NO: 4156 - DNA, 17 bp, synthetic construct
  source 1..17: mol_type = other DNA
gcgattcactgaggacc

SEQ ID NO: 4157 - DNA, 17 bp, synthetic construct
  source 1..17: mol_type = other DNA
cgcgattcactgaggac

SEQ ID NO: 4158 - DNA, 17 bp, synthetic construct
  source 1..17: mol_type = other DNA
gcgcgattcactgagga

SEQ ID NO: 4159 - DNA, 17 bp, synthetic construct
  source 1..17: mol_type = other DNA
tgcgcgattcactgagg

SEQ ID NO: 4160 - DNA, 17 bp, synthetic construct
  source 1..17: mol_type = other DNA
ctgcgcgattcactgag

SEQ ID NO: 4161 - DNA, 17 bp, synthetic construct
  source 1..17: mol_type = other DNA
tctgcgcgattcactga

SEQ ID NO: 4162 - DNA, 17 bp, synthetic construct
  source 1..17: mol_type = other DNA
tcctcccacttcagttt

SEQ ID NO: 4163 - DNA, 17 bp, synthetic construct
  source 1..17: mol_type = other DNA
ttcctcccacttcagtt

SEQ ID NO: 4164 - DNA, 17 bp, synthetic construct
  source 1..17: mol_type = other DNA
cttcctcccacttcagt

SEQ ID NO: 4165 - DNA, 17 bp, synthetic construct
  source 1..17: mol_type = other DNA
tgcttcctcccacttca

SEQ ID NO: 4166 - DNA, 17 bp, synthetic construct
  source 1..17: mol_type = other DNA
atgcttcctcccacttc

SEQ ID NO: 4167 - DNA, 17 bp, synthetic construct
  source 1..17: mol_type = other DNA
catgcttcctcccactt

SEQ ID NO: 4168 - DNA, 17 bp, synthetic construct
  source 1..17: mol_type = other DNA
gcatgcttcctcccact

SEQ ID NO: 4169 - DNA, 17 bp, synthetic construct
  source 1..17: mol_type = other DNA
ggcatgcttcctcccac

SEQ ID NO: 4170 - DNA, 17 bp, synthetic construct
  source 1..17: mol_type = other DNA
aggcatgcttcctccca

SEQ ID NO: 4171 - DNA, 17 bp, synthetic construct
  source 1..17: mol_type = other DNA
taggcatgcttcctccc

SEQ ID NO: 4172 - DNA, 17 bp, synthetic construct
  source 1..17: mol_type = other DNA
ttaggcatgcttcctcc

SEQ ID NO: 4173 - DNA, 17 bp, synthetic construct
  source 1..17: mol_type = other DNA
cttaggcatgcttcctc

SEQ ID NO: 4174 - DNA, 17 bp, synthetic construct
  source 1..17: mol_type = other DNA
acttaggcatgcttcct

SEQ ID NO: 4175 - DNA, 17 bp, synthetic construct
  source 1..17: mol_type = other DNA
aacttaggcatgcttcc

SEQ ID NO: 4176 - DNA, 17 bp, synthetic construct
  source 1..17: mol_type = other DNA
aaacttaggcatgcttc

SEQ ID NO: 4177 - DNA, 17 bp, synthetic construct
  source 1..17: mol_type = other DNA
aaaacttaggcatgctt

SEQ ID NO: 4178 - DNA, 17 bp, synthetic construct
  source 1..17: mol_type = other DNA
gaaaacttaggcatgct

SEQ ID NO: 4179 - DNA, 17 bp, synthetic construct
  source 1..17: mol_type = other DNA
ggaaaacttaggcatgc

SEQ ID NO: 4180 - DNA, 17 bp, synthetic construct
  source 1..17: mol_type = other DNA
aggaaaacttaggcatg

SEQ ID NO: 4181 - DNA, 17 bp, synthetic construct
  source 1..17: mol_type = other DNA
aaggaaaacttaggcat

SEQ ID NO: 4182 - DNA, 17 bp, synthetic construct
  source 1..17: mol_type = other DNA
taaggaaaacttaggca

SEQ ID NO: 4183 - DNA, 17 bp, synthetic construct
  source 1..17: mol_type = other DNA
ctaaggaaaacttaggc

SEQ ID NO: 4184 - DNA, 17 bp, synthetic construct
  source 1..17: mol_type = other DNA
gatgacttcccagggtc

SEQ ID NO: 4185 - DNA, 17 bp, synthetic construct
  source 1..17: mol_type = other DNA
tgatgacttcccagggt

SEQ ID NO: 4186 - DNA, 17 bp, synthetic construct
  source 1..17: mol_type = other DNA
gtgatgacttcccaggg

SEQ ID NO: 4187 - DNA, 17 bp, synthetic construct
  source 1..17: mol_type = other DNA
tgtgatgacttcccagg

SEQ ID NO: 4188 - DNA, 17 bp, synthetic construct
  source 1..17: mol_type = other DNA
ctgtgatgacttcccag

SEQ ID NO: 4189 - DNA, 17 bp, synthetic construct
  source 1..17: mol_type = other DNA
gctgtgatgacttccca

SEQ ID NO: 4190 - DNA, 17 bp, synthetic construct
  source 1..17: mol_type = other DNA
agctgtgatgacttccc

SEQ ID NO: 4191 - DNA, 17 bp, synthetic construct
  source 1..17: mol_type = other DNA
cagctgtgatgacttcc

SEQ ID NO: 4192 - DNA, 17 bp, synthetic construct
  source 1..17: mol_type = other DNA
acagctgtgatgacttc

SEQ ID NO: 4193 - DNA, 17 bp, synthetic construct
  source 1..17: mol_type = other DNA
gacagctgtgatgactt

SEQ ID NO: 4194 - DNA, 17 bp, synthetic construct
  source 1..17: mol_type = other DNA
tgtcagagaggctcagc

SEQ ID NO: 4195 - DNA, 17 bp, synthetic construct
  source 1..17: mol_type = other DNA
atgtcagagaggctcag

SEQ ID NO: 4196 - DNA, 17 bp, synthetic construct
  source 1..17: mol_type = other DNA
catgtcagagaggctca

SEQ ID NO: 4197 - DNA, 17 bp, synthetic construct
  source 1..17: mol_type = other DNA
ccatgtcagagaggctc

SEQ ID NO: 4198 - DNA, 17 bp, synthetic construct
  source 1..17: mol_type = other DNA
tccatgtcagagaggct

SEQ ID NO: 4199 - DNA, 17 bp, synthetic construct
  source 1..17: mol_type = other DNA
atccatgtcagagaggc

SEQ ID NO: 4200 - DNA, 17 bp, synthetic construct
  source 1..17: mol_type = other DNA
aatccatgtcagagagg

SEQ ID NO: 4201 - DNA, 17 bp, synthetic construct
  source 1..17: mol_type = other DNA
aaatccatgtcagagag

SEQ ID NO: 4202 - DNA, 17 bp, synthetic construct
  source 1..17: mol_type = other DNA
tagtcgatttaccagaa

SEQ ID NO: 4203 - DNA, 17 bp, synthetic construct
  source 1..17: mol_type = other DNA
atagtcgatttaccaga

SEQ ID NO: 4204 - DNA, 17 bp, synthetic construct
  source 1..17: mol_type = other DNA
gatagtcgatttaccag

SEQ ID NO: 4205 - DNA, 17 bp, synthetic construct
  source 1..17: mol_type = other DNA
ggatagtcgatttacca

SEQ ID NO: 4206 - DNA, 17 bp, synthetic construct
  source 1..17: mol_type = other DNA
tggatagtcgatttacc

SEQ ID NO: 4207 - DNA, 17 bp, synthetic construct
  source 1..17: mol_type = other DNA
ttggatagtcgatttac

SEQ ID NO: 4208 - DNA, 17 bp, synthetic construct
  source 1..17: mol_type = other DNA
tttggatagtcgattta

SEQ ID NO: 4209 - DNA, 17 bp, synthetic construct
  source 1..17: mol_type = other DNA
cgatgttacattaaggg

SEQ ID NO: 4210 - DNA, 17 bp, synthetic construct
  source 1..17: mol_type = other DNA
tcgatgttacattaagg

SEQ ID NO: 4211 - DNA, 17 bp, synthetic construct
  source 1..17: mol_type = other DNA
ctcgatgttacattaag

SEQ ID NO: 4212 - DNA, 17 bp, synthetic construct
  source 1..17: mol_type = other DNA
attattctaaaactcaa

SEQ ID NO: 4213 - DNA, 17 bp, synthetic construct
  source 1..17: mol_type = other DNA
gattattctaaaactca

SEQ ID NO: 4214 - DNA, 17 bp, synthetic construct
  source 1..17: mol_type = other DNA
tgattattctaaaactc

SEQ ID NO: 4215 - DNA, 17 bp, synthetic construct
  source 1..17: mol_type = other DNA
gggcagtcaccatttgc

SEQ ID NO: 4216 - DNA, 17 bp, synthetic construct
  source 1..17: mol_type = other DNA
tgggcagtcaccatttg

SEQ ID NO: 4217 - DNA, 17 bp, synthetic construct
  source 1..17: mol_type = other DNA
ttgggcagtcaccattt

SEQ ID NO: 4218 - DNA, 17 bp, synthetic construct
  source 1..17: mol_type = other DNA
cctcgatgttacattaa

SEQ ID NO: 4219 - DNA, 17 bp, synthetic construct
  source 1..17: mol_type = other DNA
tattgcaaccactagga

SEQ ID NO: 4220 - DNA, 17 bp, synthetic construct
  source 1..17: mol_type = other DNA
ttattgcaaccactagg

SEQ ID NO: 4221 - DNA, 17 bp, synthetic construct
  source 1..17: mol_type = other DNA
gttattgcaaccactag

SEQ ID NO: 4222 - DNA, 17 bp, synthetic construct
  source 1..17: mol_type = other DNA
ggttattgcaaccacta

SEQ ID NO: 4223 - DNA, 17 bp, synthetic construct
  source 1..17: mol_type = other DNA
agttaaagtgtggtaca

SEQ ID NO: 4224 - DNA, 17 bp, synthetic construct
  source 1..17: mol_type = other DNA
cagttaaagtgtggtac

SEQ ID NO: 4225 - DNA, 17 bp, synthetic construct
  source 1..17: mol_type = other DNA
acagttaaagtgtggta

SEQ ID NO: 4226 - DNA, 17 bp, synthetic construct
  source 1..17: mol_type = other DNA
atgcctaggtcacagtt

SEQ ID NO: 4227 - DNA, 17 bp, synthetic construct
  source 1..17: mol_type = other DNA
aatgcctaggtcacagt

SEQ ID NO: 4228 - DNA, 17 bp, synthetic construct
  source 1..17: mol_type = other DNA
caatgcctaggtcacag

SEQ ID NO: 4229 - DNA, 17 bp, synthetic construct
  source 1..17: mol_type = other DNA
ccaatgcctaggtcaca

SEQ ID NO: 4230 - DNA, 17 bp, synthetic construct
  source 1..17: mol_type = other DNA
gccaatgcctaggtcac

SEQ ID NO: 4231 - DNA, 17 bp, synthetic construct
  source 1..17: mol_type = other DNA
tgccaatgcctaggtca

SEQ ID NO: 4232 - DNA, 17 bp, synthetic construct
  source 1..17: mol_type = other DNA
atgccaatgcctaggtc

SEQ ID NO: 4233 - DNA, 17 bp, synthetic construct
  source 1..17: mol_type = other DNA
aatgccaatgcctaggt

SEQ ID NO: 4234 - DNA, 17 bp, synthetic construct
  source 1..17: mol_type = other DNA
caatgccaatgcctagg

SEQ ID NO: 4235 - DNA, 17 bp, synthetic construct
  source 1..17: mol_type = other DNA
gcaatgccaatgcctag

SEQ ID NO: 4236 - DNA, 17 bp, synthetic construct
  source 1..17: mol_type = other DNA
agcgataatcacacaag

SEQ ID NO: 4237 - DNA, 17 bp, synthetic construct
  source 1..17: mol_type = other DNA
cagcgataatcacacaa

SEQ ID NO: 4238 - DNA, 17 bp, synthetic construct
  source 1..17: mol_type = other DNA
acagcgataatcacaca

SEQ ID NO: 4239 - DNA, 17 bp, synthetic construct
  source 1..17: mol_type = other DNA
cacagcgataatcacac

SEQ ID NO: 4240 - DNA, 17 bp, synthetic construct
  source 1..17: mol_type = other DNA
ccacagcgataatcaca

SEQ ID NO: 4241 - DNA, 17 bp, synthetic construct
  source 1..17: mol_type = other DNA
accacagcgataatcac

SEQ ID NO: 4242 - DNA, 17 bp, synthetic construct
  source 1..17: mol_type = other DNA
aaccacagcgataatca

SEQ ID NO: 4243 - DNA, 17 bp, synthetic construct
  source 1..17: mol_type = other DNA
ggtctgccactctctac

SEQ ID NO: 4244 - DNA, 17 bp, synthetic construct
  source 1..17: mol_type = other DNA
gggtctgccactctcta

SEQ ID NO: 4245 - DNA, 17 bp, synthetic construct
  source 1..17: mol_type = other DNA
agggtctgccactctct

SEQ ID NO: 4246 - DNA, 17 bp, synthetic construct
  source 1..17: mol_type = other DNA
agtcatcttgtgtacat

SEQ ID NO: 4247 - DNA, 17 bp, synthetic construct
  source 1..17: mol_type = other DNA
cagtcatcttgtgtaca

SEQ ID NO: 4248 - DNA, 17 bp, synthetic construct
  source 1..17: mol_type = other DNA
acagtcatcttgtgtac

SEQ ID NO: 4249 - DNA, 17 bp, synthetic construct
  source 1..17: mol_type = other DNA
cagatcactctgcacag

SEQ ID NO: 4250 - DNA, 17 bp, synthetic construct
  source 1..17: mol_type = other DNA
tcagatcactctgcaca

SEQ ID NO: 4251 - DNA, 17 bp, synthetic construct
  source 1..17: mol_type = other DNA
ctcagatcactctgcac

SEQ ID NO: 4252 - DNA, 17 bp, synthetic construct
  source 1..17: mol_type = other DNA
tgctcagatcactctgc

SEQ ID NO: 4253 - DNA, 17 bp, synthetic construct
  source 1..17: mol_type = other DNA
ttgctcagatcactctg

SEQ ID NO: 4254 - DNA, 17 bp, synthetic construct
  source 1..17: mol_type = other DNA
attgctcagatcactct

SEQ ID NO: 4255 - DNA, 17 bp, synthetic construct
  source 1..17: mol_type = other DNA
acctcttccaggaagac

SEQ ID NO: 4256 - DNA, 17 bp, synthetic construct
  source 1..17: mol_type = other DNA
cacctcttccaggaaga

SEQ ID NO: 4257 - DNA, 17 bp, synthetic construct
  source 1..17: mol_type = other DNA
tcacctcttccaggaag

SEQ ID NO: 4258 - DNA, 17 bp, synthetic construct
  source 1..17: mol_type = other DNA
actgaatgtcacctctt

SEQ ID NO: 4259 - DNA, 17 bp, synthetic construct
  source 1..17: mol_type = other DNA
gactgaatgtcacctct

SEQ ID NO: 4260 - DNA, 17 bp, synthetic construct
  source 1..17: mol_type = other DNA
ggactgaatgtcacctc

SEQ ID NO: 4261 - DNA, 17 bp, synthetic construct
  source 1..17: mol_type = other DNA
cggactgaatgtcacct

SEQ ID NO: 4262 - DNA, 17 bp, synthetic construct
  source 1..17: mol_type = other DNA
ccggactgaatgtcacc

SEQ ID NO: 4263 - DNA, 17 bp, synthetic construct
  source 1..17: mol_type = other DNA
tccggactgaatgtcac

SEQ ID NO: 4264 - DNA, 17 bp, synthetic construct
  source 1..17: mol_type = other DNA
tctttccagatccggac

SEQ ID NO: 4265 - DNA, 17 bp, synthetic construct
  source 1..17: mol_type = other DNA
atctttccagatccgga

SEQ ID NO: 4266 - DNA, 17 bp, synthetic construct
  source 1..17: mol_type = other DNA
catctttccagatccgg

SEQ ID NO: 4267 - DNA, 17 bp, synthetic construct
  source 1..17: mol_type = other DNA
tcatctttccagatccg

SEQ ID NO: 4268 - DNA, 17 bp, synthetic construct
  source 1..17: mol_type = other DNA
ttcatctttccagatcc

SEQ ID NO: 4269 - DNA, 17 bp, synthetic construct
  source 1..17: mol_type = other DNA
attcatctttccagatc

SEQ ID NO: 4270 - DNA, 17 bp, synthetic construct
  source 1..17: mol_type = other DNA
tctcaagtcttcctcct

SEQ ID NO: 4271 - DNA, 17 bp, synthetic construct
  source 1..17: mol_type = other DNA
ctctcaagtcttcctcc

SEQ ID NO: 4272 - DNA, 17 bp, synthetic construct
  source 1..17: mol_type = other DNA
gctctcaagtcttcctc

SEQ ID NO: 4273 - DNA, 17 bp, synthetic construct
  source 1..17: mol_type = other DNA
agctctcaagtcttcct

SEQ ID NO: 4274 - DNA, 17 bp, synthetic construct
  source 1..17: mol_type = other DNA
gagctctcaagtcttcc

SEQ ID NO: 4275 - DNA, 17 bp, synthetic construct
  source 1..17: mol_type = other DNA
tgagctctcaagtcttc

SEQ ID NO: 4276 - DNA, 17 bp, synthetic construct
  source 1..17: mol_type = other DNA
ataatctgcacaggttc

SEQ ID NO: 4277 - DNA, 17 bp, synthetic construct
  source 1..17: mol_type = other DNA
cataatctgcacaggtt

SEQ ID NO: 4278 - DNA, 17 bp, synthetic construct
  source 1..17: mol_type = other DNA
ccataatctgcacaggt

SEQ ID NO: 4279 - DNA, 17 bp, synthetic construct
  source 1..17: mol_type = other DNA
accataatctgcacagg

SEQ ID NO: 4280 - DNA, 17 bp, synthetic construct
  source 1..17: mol_type = other DNA
caccataatctgcacag

SEQ ID NO: 4281 - DNA, 17 bp, synthetic construct
  source 1..17: mol_type = other DNA
gcaccataatctgcaca

SEQ ID NO: 4282 - DNA, 17 bp, synthetic construct
  source 1..17: mol_type = other DNA
ttaatccaggattgtca

SEQ ID NO: 4283 - DNA, 17 bp, synthetic construct
  source 1..17: mol_type = other DNA
tttaatccaggattgtc

SEQ ID NO: 4284 - DNA, 17 bp, synthetic construct
  source 1..17: mol_type = other DNA
ctttaatccaggattgt

SEQ ID NO: 4285 - DNA, 17 bp, synthetic construct
  source 1..17: mol_type = other DNA
tagctttaatccaggat

SEQ ID NO: 4286 - DNA, 17 bp, synthetic construct
  source 1..17: mol_type = other DNA
ttagctttaatccagga

SEQ ID NO: 4287 - DNA, 17 bp, synthetic construct
  source 1..17: mol_type = other DNA
cttagctttaatccagg

SEQ ID NO: 4288 - DNA, 17 bp, synthetic construct
  source 1..17: mol_type = other DNA
ccttagctttaatccag

SEQ ID NO: 4289 - DNA, 17 bp, synthetic construct
  source 1..17: mol_type = other DNA
tccttagctttaatcca

SEQ ID NO: 4290 - DNA, 17 bp, synthetic construct
  source 1..17: mol_type = other DNA
ctccttagctttaatcc

SEQ ID NO: 4291 - DNA, 17 bp, synthetic construct
  source 1..17: mol_type = other DNA
cctccttagctttaatc

SEQ ID NO: 4292 - DNA, 17 bp, synthetic construct
  source 1..17: mol_type = other DNA
tcctccttagctttaat

SEQ ID NO: 4293 - DNA, 17 bp, synthetic construct
  source 1..17: mol_type = other DNA
tcagtgtcctccttagc

SEQ ID NO: 4294 - DNA, 17 bp, synthetic construct
  source 1..17: mol_type = other DNA
ctcagtgtcctccttag

SEQ ID NO: 4295 - DNA, 17 bp, synthetic construct
  source 1..17: mol_type = other DNA
actcagtgtcctcctta

SEQ ID NO: 4296 - DNA, 17 bp, synthetic construct
  source 1..17: mol_type = other DNA
gactcagtgtcctcctt

SEQ ID NO: 4297 - DNA, 17 bp, synthetic construct
  source 1..17: mol_type = other DNA
ggactcagtgtcctcct

SEQ ID NO: 4298 - DNA, 17 bp, synthetic construct
  source 1..17: mol_type = other DNA
tgggactcagtgtcctc

SEQ ID NO: 4299 - DNA, 17 bp, synthetic construct
  source 1..17: mol_type = other DNA
ctgggactcagtgtcct

SEQ ID NO: 4300 - DNA, 17 bp, synthetic construct
  source 1..17: mol_type = other DNA
cctgggactcagtgtcc

SEQ ID NO: 4301 - DNA, 17 bp, synthetic construct
  source 1..17: mol_type = other DNA
ctgtttgatgggtaaaa

SEQ ID NO: 4302 - DNA, 17 bp, synthetic construct
  source 1..17: mol_type = other DNA
cctgtttgatgggtaaa

SEQ ID NO: 4303 - DNA, 17 bp, synthetic construct
  source 1..17: mol_type = other DNA
tcctgtttgatgggtaa

SEQ ID NO: 4304 - DNA, 17 bp, synthetic construct
  source 1..17: mol_type = other DNA
ctcctgtttgatgggta

SEQ ID NO: 4305 - DNA, 17 bp, synthetic construct
  source 1..17: mol_type = other DNA
tctcctgtttgatgggt

SEQ ID NO: 4306 - DNA, 17 bp, synthetic construct
  source 1..17: mol_type = other DNA
ctctcctgtttgatggg

SEQ ID NO: 4307 - DNA, 17 bp, synthetic construct
  source 1..17: mol_type = other DNA
cctctcctgtttgatgg

SEQ ID NO: 4308 - DNA, 17 bp, synthetic construct
  source 1..17: mol_type = other DNA
tcggtgtcctctcctgt

SEQ ID NO: 4309 - DNA, 17 bp, synthetic construct
  source 1..17: mol_type = other DNA
ctcggtgtcctctcctg

SEQ ID NO: 4310 - DNA, 17 bp, synthetic construct
  source 1..17: mol_type = other DNA
cctcggtgtcctctcct

SEQ ID NO: 4311 - DNA, 17 bp, synthetic construct
  source 1..17: mol_type = other DNA
gcctcggtgtcctctcc

SEQ ID NO: 4312 - DNA, 17 bp, synthetic construct
  source 1..17: mol_type = other DNA
agcctcggtgtcctctc

SEQ ID NO: 4313 - DNA, 17 bp, synthetic construct
  source 1..17: mol_type = other DNA
aagcctcggtgtcctct

SEQ ID NO: 4314 - DNA, 17 bp, synthetic construct
  source 1..17: mol_type = other DNA
taagcctcggtgtcctc

SEQ ID NO: 4315 - DNA, 17 bp, synthetic construct
  source 1..17: mol_type = other DNA
gtaagcctcggtgtcct

SEQ ID NO: 4316 - DNA, 17 bp, synthetic construct
  source 1..17: mol_type = other DNA
agtaagcctcggtgtcc

SEQ ID NO: 4317 - DNA, 17 bp, synthetic construct
  source 1..17: mol_type = other DNA
ccagattgttgtgggaa

SEQ ID NO: 4318 - DNA, 17 bp, synthetic construct
  source 1..17: mol_type = other DNA
accagattgttgtggga

SEQ ID NO: 4319 - DNA, 17 bp, synthetic construct
  source 1..17: mol_type = other DNA
caccagattgttgtggg

SEQ ID NO: 4320 - DNA, 17 bp, synthetic construct
  source 1..17: mol_type = other DNA
ctaatacctacctcacc

SEQ ID NO: 4321 - DNA, 17 bp, synthetic construct
  source 1..17: mol_type = other DNA
gctaatacctacctcac

SEQ ID NO: 4322 - DNA, 17 bp, synthetic construct
  source 1..17: mol_type = other DNA
ggctaatacctacctca

SEQ ID NO: 4323 - DNA, 17 bp, synthetic construct
  source 1..17: mol_type = other DNA
ctcatctatacagtggg

SEQ ID NO: 4324 - DNA, 17 bp, synthetic construct
  source 1..17: mol_type = other DNA
cctcatctatacagtgg

SEQ ID NO: 4325 - DNA, 17 bp, synthetic construct
  source 1..17: mol_type = other DNA
tcctcatctatacagtg

SEQ ID NO: 4326 - DNA, 17 bp, synthetic construct
  source 1..17: mol_type = other DNA
actggcatctggcaggg

SEQ ID NO: 4327 - DNA, 17 bp, synthetic construct
  source 1..17: mol_type = other DNA
tactggcatctggcagg

SEQ ID NO: 4328 - DNA, 17 bp, synthetic construct
  source 1..17: mol_type = other DNA
atactggcatctggcag

SEQ ID NO: 4329 - DNA, 17 bp, synthetic construct
  source 1..17: mol_type = other DNA
tcacctccatactggca

SEQ ID NO: 4330 - DNA, 17 bp, synthetic construct
  source 1..17: mol_type = other DNA
ctcacctccatactggc

SEQ ID NO: 4331 - DNA, 17 bp, synthetic construct
  source 1..17: mol_type = other DNA
cctcacctccatactgg

SEQ ID NO: 4332 - DNA, 17 bp, synthetic construct
  source 1..17: mol_type = other DNA
atgcttaacttctgctg

SEQ ID NO: 4333 - DNA, 17 bp, synthetic construct
  source 1..17: mol_type = other DNA
gatgcttaacttctgct

SEQ ID NO: 4334 - DNA, 17 bp, synthetic construct
  source 1..17: mol_type = other DNA
ggatgcttaacttctgc

SEQ ID NO: 4335 - DNA, 17 bp, synthetic construct
  source 1..17: mol_type = other DNA
aggatgcttaacttctg

SEQ ID NO: 4336 - DNA, 17 bp, synthetic construct
  source 1..17: mol_type = other DNA
taggatgcttaacttct

SEQ ID NO: 4337 - DNA, 17 bp, synthetic construct
  source 1..17: mol_type = other DNA
ttaggatgcttaacttc

SEQ ID NO: 4338 - DNA, 17 bp, synthetic construct
  source 1..17: mol_type = other DNA
ggcctggatgcccaagt

SEQ ID NO: 4339 - DNA, 17 bp, synthetic construct
  source 1..17: mol_type = other DNA
aggcctggatgcccaag

SEQ ID NO: 4340 - DNA, 17 bp, synthetic construct
  source 1..17: mol_type = other DNA
taggcctggatgcccaa

SEQ ID NO: 4341 - DNA, 17 bp, synthetic construct
  source 1..17: mol_type = other DNA
cagatgatgtcctgcct

SEQ ID NO: 4342 - DNA, 17 bp, synthetic construct
  source 1..17: mol_type = other DNA
gcagatgatgtcctgcc

SEQ ID NO: 4343 - DNA, 17 bp, synthetic construct
  source 1..17: mol_type = other DNA
agcagatgatgtcctgc

SEQ ID NO: 4344 - DNA, 17 bp, synthetic construct
  source 1..17: mol_type = other DNA
tagtcaaaggtggcttc

SEQ ID NO: 4345 - DNA, 17 bp, synthetic construct
  source 1..17: mol_type = other DNA
gtagtcaaaggtggctt

SEQ ID NO: 4346 - DNA, 17 bp, synthetic construct
  source 1..17: mol_type = other DNA
agtagtcaaaggtggct

SEQ ID NO: 4347 - DNA, 17 bp, synthetic construct
  source 1..17: mol_type = other DNA
aacaagtgggaaatgca

SEQ ID NO: 4348 - DNA, 17 bp, synthetic construct
  source 1..17: mol_type = other DNA
caacaagtgggaaatgc

SEQ ID NO: 4349 - DNA, 17 bp, synthetic construct
  source 1..17: mol_type = other DNA
ccaacaagtgggaaatg

SEQ ID NO: 4350 - DNA, 17 bp, synthetic construct
  source 1..17: mol_type = other DNA
agcttattaggtgtctt

SEQ ID NO: 4351 - DNA, 17 bp, synthetic construct
  source 1..17: mol_type = other DNA
aagcttattaggtgtct

SEQ ID NO: 4352 - DNA, 17 bp, synthetic construct
  source 1..17: mol_type = other DNA
taagcttattaggtgtc

SEQ ID NO: 4353 - DNA, 17 bp, synthetic construct
  source 1..17: mol_type = other DNA
ctaagcttattaggtgt

SEQ ID NO: 4354 - DNA, 17 bp, synthetic construct
  source 1..17: mol_type = other DNA
cccccatgcagcttgga

SEQ ID NO: 4355 - DNA, 17 bp, synthetic construct
  source 1..17: mol_type = other DNA
gcccccatgcagcttgg

SEQ ID NO: 4356 - DNA, 17 bp, synthetic construct
  source 1..17: mol_type = other DNA
agcccccatgcagcttg

SEQ ID NO: 4357 - DNA, 17 bp, synthetic construct
  source 1..17: mol_type = other DNA
ccaaacactcaggtagg

SEQ ID NO: 4358 - DNA, 17 bp, synthetic construct
  source 1..17: mol_type = other DNA
tccaaacactcaggtag

SEQ ID NO: 4359 - DNA, 17 bp, synthetic construct
  source 1..17: mol_type = other DNA
gtccaaacactcaggta

SEQ ID NO: 4360 - DNA, 17 bp, synthetic construct
  source 1..17: mol_type = other DNA
cagtccaaacactcagg

SEQ ID NO: 4361 - DNA, 17 bp, synthetic construct
  source 1..17: mol_type = other DNA
tcagtccaaacactcag

SEQ ID NO: 4362 - DNA, 17 bp, synthetic construct
  source 1..17: mol_type = other DNA
ttcagtccaaacactca

SEQ ID NO: 4363 - DNA, 17 bp, synthetic construct
  source 1..17: mol_type = other DNA
gaacagcagcatcagca

SEQ ID NO: 4364 - DNA, 17 bp, synthetic construct
  source 1..17: mol_type = other DNA
ggaacagcagcatcagc

SEQ ID NO: 4365 - DNA, 17 bp, synthetic construct
  source 1..17: mol_type = other DNA
gggaacagcagcatcag

SEQ ID NO: 4366 - DNA, 17 bp, synthetic construct
  source 1..17: mol_type = other DNA
tgggaacagcagcatca

SEQ ID NO: 4367 - DNA, 17 bp, synthetic construct
  source 1..17: mol_type = other DNA
ctgggaacagcagcatc

SEQ ID NO: 4368 - DNA, 17 bp, synthetic construct
  source 1..17: mol_type = other DNA
tctgggaacagcagcat

SEQ ID NO: 4369 - DNA, 17 bp, synthetic construct
  source 1..17: mol_type = other DNA
tctaaaactcaaatcca

SEQ ID NO: 4370 - DNA, 17 bp, synthetic construct
  source 1..17: mol_type = other DNA
ttctaaaactcaaatcc

SEQ ID NO: 4371 - DNA, 17 bp, synthetic construct
  source 1..17: mol_type = other DNA
attctaaaactcaaatc

SEQ ID NO: 4372 - DNA, 17 bp, synthetic construct
  source 1..17: mol_type = other DNA
gtctgggaacagcagca

SEQ ID NO: 4373 - DNA, 17 bp, synthetic construct
  source 1..17: mol_type = other DNA
ggtctgggaacagcagc

SEQ ID NO: 4374 - DNA, 17 bp, synthetic construct
  source 1..17: mol_type = other DNA
tggtctgggaacagcag

SEQ ID NO: 4375 - DNA, 17 bp, synthetic construct
  source 1..17: mol_type = other DNA
acaagtcatcttccagc

SEQ ID NO: 4376 - DNA, 17 bp, synthetic construct
  source 1..17: mol_type = other DNA
gacaagtcatcttccag

SEQ ID NO: 4377 - DNA, 17 bp, synthetic construct
  source 1..17: mol_type = other DNA
ggacaagtcatcttcca

SEQ ID NO: 4378 - DNA, 17 bp, synthetic construct
  source 1..17: mol_type = other DNA
atccttgagggtctcat

SEQ ID NO: 4379 - DNA, 17 bp, synthetic construct
  source 1..17: mol_type = other DNA
tatccttgagggtctca

SEQ ID NO: 4380 - DNA, 17 bp, synthetic construct
  source 1..17: mol_type = other DNA
ttatccttgagggtctc

SEQ ID NO: 4381 - DNA, 17 bp, synthetic construct
  source 1..17: mol_type = other DNA
cttatccttgagggtct

SEQ ID NO: 4382 - DNA, 17 bp, synthetic construct
  source 1..17: mol_type = other DNA
cctggatggcaacctaa

SEQ ID NO: 4383 - DNA, 17 bp, synthetic construct
  source 1..17: mol_type = other DNA
gcctggatggcaaccta

SEQ ID NO: 4384 - DNA, 17 bp, synthetic construct
  source 1..17: mol_type = other DNA
ggcctggatggcaacct

SEQ ID NO: 4385 - DNA, 17 bp, synthetic construct
  source 1..17: mol_type = other DNA
ctgctatgctgagagca

SEQ ID NO: 4386 - DNA, 17 bp, synthetic construct
  source 1..17: mol_type = other DNA
cctgctatgctgagagc

SEQ ID NO: 4387 - DNA, 17 bp, synthetic construct
  source 1..17: mol_type = other DNA
acctgctatgctgagag

SEQ ID NO: 4388 - DNA, 17 bp, synthetic construct
  source 1..17: mol_type = other DNA
gttcatctgccttgacg

SEQ ID NO: 4389 - DNA, 17 bp, synthetic construct
  source 1..17: mol_type = other DNA
ggttcatctgccttgac

SEQ ID NO: 4390 - DNA, 17 bp, synthetic construct
  source 1..17: mol_type = other DNA
aggttcatctgccttga

SEQ ID NO: 4391 - DNA, 17 bp, synthetic construct
  source 1..17: mol_type = other DNA
caggttcatctgccttg

SEQ ID NO: 4392 - DNA, 17 bp, synthetic construct
  source 1..17: mol_type = other DNA
gcaggttcatctgcctt

SEQ ID NO: 4393 - DNA, 17 bp, synthetic construct
  source 1..17: mol_type = other DNA
agcaggttcatctgcct

SEQ ID NO: 4394 - DNA, 17 bp, synthetic construct
  source 1..17: mol_type = other DNA
tctgtgatgctctggag

SEQ ID NO: 4395 - DNA, 17 bp, synthetic construct
  source 1..17: mol_type = other DNA
ctctgtgatgctctgga

SEQ ID NO: 4396 - DNA, 17 bp, synthetic construct
  source 1..17: mol_type = other DNA
actctgtgatgctctgg

SEQ ID NO: 4397 - DNA, 17 bp, synthetic construct
  source 1..17: mol_type = other DNA
cactctgtgatgctctg

SEQ ID NO: 4398 - DNA, 17 bp, synthetic construct
  source 1..17: mol_type = other DNA
acatggtaagtcctgat

SEQ ID NO: 4399 - DNA, 17 bp, synthetic construct
  source 1..17: mol_type = other DNA
gacatggtaagtcctga

SEQ ID NO: 4400 - DNA, 17 bp, synthetic construct
  source 1..17: mol_type = other DNA
tgacatggtaagtcctg

SEQ ID NO: 4401 - DNA, 17 bp, synthetic construct
  source 1..17: mol_type = other DNA
ctgacatggtaagtcct

SEQ ID NO: 4402 - DNA, 17 bp, synthetic construct
  source 1..17: mol_type = other DNA
actgacatggtaagtcc

SEQ ID NO: 4403 - DNA, 17 bp, synthetic construct
  source 1..17: mol_type = other DNA
cactgacatggtaagtc

SEQ ID NO: 4404 - DNA, 17 bp, synthetic construct
  source 1..17: mol_type = other DNA
tctgccatttaatgagc

SEQ ID NO: 4405 - DNA, 17 bp, synthetic construct
  source 1..17: mol_type = other DNA
ctctgccatttaatgag

SEQ ID NO: 4406 - DNA, 17 bp, synthetic construct
  source 1..17: mol_type = other DNA
actctgccatttaatga

SEQ ID NO: 4407 - DNA, 17 bp, synthetic construct
  source 1..17: mol_type = other DNA
ccaactctgccatttaa

SEQ ID NO: 4408 - DNA, 17 bp, synthetic construct
  source 1..17: mol_type = other DNA
cccaactctgccattta

SEQ ID NO: 4409 - DNA, 17 bp, synthetic construct
  source 1..17: mol_type = other DNA
tcccaactctgccattt

SEQ ID NO: 4410 - DNA, 17 bp, synthetic construct
  source 1..17: mol_type = other DNA
agggttcatggatcccc

SEQ ID NO: 4411 - DNA, 17 bp, synthetic construct
  source 1..17: mol_type = other DNA
aagggttcatggatccc

SEQ ID NO: 4412 - DNA, 17 bp, synthetic construct
  source 1..17: mol_type = other DNA
taagggttcatggatcc

SEQ ID NO: 4413 - DNA, 17 bp, synthetic construct
  source 1..17: mol_type = other DNA
ctggagtccctgggttc

SEQ ID NO: 4414 - DNA, 17 bp, synthetic construct
  source 1..17: mol_type = other DNA
gctggagtccctgggtt

SEQ ID NO: 4415 - DNA, 17 bp, synthetic construct
  source 1..17: mol_type = other DNA
ggctggagtccctgggt

SEQ ID NO: 4416 - DNA, 17 bp, synthetic construct
  source 1..17: mol_type = other DNA
agccaggcccagaccca

SEQ ID NO: 4417 - DNA, 17 bp, synthetic construct
  source 1..17: mol_type = other DNA
cagccaggcccagaccc

SEQ ID NO: 4418 - DNA, 17 bp, synthetic construct
  source 1..17: mol_type = other DNA
ccagccaggcccagacc

SEQ ID NO: 4419 - DNA, 17 bp, synthetic construct
  source 1..17: mol_type = other DNA
ggtgttctacaagctgc

SEQ ID NO: 4420 - DNA, 17 bp, synthetic construct
  source 1..17: mol_type = other DNA
tggtgttctacaagctg

SEQ ID NO: 4421 - DNA, 17 bp, synthetic construct
  source 1..17: mol_type = other DNA
ctggtgttctacaagct

SEQ ID NO: 4422 - DNA, 17 bp, synthetic construct
  source 1..17: mol_type = other DNA
gagctggtgttctacaa

SEQ ID NO: 4423 - DNA, 17 bp, synthetic construct
  source 1..17: mol_type = other DNA
tgagctggtgttctaca

SEQ ID NO: 4424 - DNA, 17 bp, synthetic construct
  source 1..17: mol_type = other DNA
gtgagctggtgttctac

SEQ ID NO: 4425 - DNA, 17 bp, synthetic construct
  source 1..17: mol_type = other DNA
gatcaattattaaccta

SEQ ID NO: 4426 - DNA, 17 bp, synthetic construct
  source 1..17: mol_type = other DNA
tgatcaattattaacct

SEQ ID NO: 4427 - DNA, 17 bp, synthetic construct
  source 1..17: mol_type = other DNA
ctgatcaattattaacc

SEQ ID NO: 4428 - DNA, 17 bp, synthetic construct
  source 1..17: mol_type = other DNA
gcaggtactcatgtttg

SEQ ID NO: 4429 - DNA, 17 bp, synthetic construct
  source 1..17: mol_type = other DNA
agcaggtactcatgttt

SEQ ID NO: 4430 - DNA, 17 bp, synthetic construct
  source 1..17: mol_type = other DNA
cagcaggtactcatgtt

SEQ ID NO: 4431 - DNA, 17 bp, synthetic construct
  source 1..17: mol_type = other DNA
ccaatatcatactatct

SEQ ID NO: 4432 - DNA, 17 bp, synthetic construct
  source 1..17: mol_type = other DNA
cccaatatcatactatc

SEQ ID NO: 4433 - DNA, 17 bp, synthetic construct
  source 1..17: mol_type = other DNA
ccccaatatcatactat

SEQ ID NO: 4434 - DNA, 17 bp, synthetic construct
  source 1..17: mol_type = other DNA
aacctttaaggcctatc

SEQ ID NO: 4435 - DNA, 17 bp, synthetic construct
  source 1..17: mol_type = other DNA
caacctttaaggcctat

SEQ ID NO: 4436 - DNA, 17 bp, synthetic construct
  source 1..17: mol_type = other DNA
ccaacctttaaggccta

SEQ ID NO: 4437 - DNA, 17 bp, synthetic construct
  source 1..17: mol_type = other DNA
cccaacctttaaggcct

SEQ ID NO: 4438 - DNA, 17 bp, synthetic construct
  source 1..17: mol_type = other DNA
attttttacccaacctt

SEQ ID NO: 4439 - DNA, 17 bp, synthetic construct
  source 1..17: mol_type = other DNA
cattttttacccaacct

SEQ ID NO: 4440 - DNA, 17 bp, synthetic construct
  source 1..17: mol_type = other DNA
ccattttttacccaacc

SEQ ID NO: 4441 - DNA, 17 bp, synthetic construct
  source 1..17: mol_type = other DNA
tccattttttacccaac

SEQ ID NO: 4442 - DNA, 17 bp, synthetic construct
  source 1..17: mol_type = other DNA
ttccattttttacccaa

SEQ ID NO: 4443 - DNA, 17 bp, synthetic construct
  source 1..17: mol_type = other DNA
gctttagaaattcacca

SEQ ID NO: 4444 - DNA, 17 bp, synthetic construct
  source 1..17: mol_type = other DNA
ggctttagaaattcacc

SEQ ID NO: 4445 - DNA, 17 bp, synthetic construct
  source 1..17: mol_type = other DNA
aggctttagaaattcac

SEQ ID NO: 4446 - DNA, 17 bp, synthetic construct
  source 1..17: mol_type = other DNA
tggacaagtcctgccca

SEQ ID NO: 4447 - DNA, 17 bp, synthetic construct
  source 1..17: mol_type = other DNA
ctggacaagtcctgccc

SEQ ID NO: 4448 - DNA, 17 bp, synthetic construct
  source 1..17: mol_type = other DNA
cctggacaagtcctgcc

SEQ ID NO: 4449 - DNA, 17 bp, synthetic construct
  source 1..17: mol_type = other DNA
gcctggacaagtcctgc

SEQ ID NO: 4450 - DNA, 17 bp, synthetic construct
  source 1..17: mol_type = other DNA
agcctggacaagtcctg

SEQ ID NO: 4451 - DNA, 17 bp, synthetic construct
  source 1..17: mol_type = other DNA
actagactatgcagcct

SEQ ID NO: 4452 - DNA, 17 bp, synthetic construct
  source 1..17: mol_type = other DNA
tactagactatgcagcc

SEQ ID NO: 4453 - DNA, 17 bp, synthetic construct
  source 1..17: mol_type = other DNA
atactagactatgcagc

SEQ ID NO: 4454 - DNA, 17 bp, synthetic construct
  source 1..17: mol_type = other DNA
catactagactatgcag

SEQ ID NO: 4455 - DNA, 17 bp, synthetic construct
  source 1..17: mol_type = other DNA
tcatactagactatgca

SEQ ID NO: 4456 - DNA, 17 bp, synthetic construct
  source 1..17: mol_type = other DNA
atcatactagactatgc

SEQ ID NO: 4457 - DNA, 17 bp, synthetic construct
  source 1..17: mol_type = other DNA
catcatactagactatg

SEQ ID NO: 4458 - DNA, 17 bp, synthetic construct
  source 1..17: mol_type = other DNA
ccatcatactagactat

SEQ ID NO: 4459 - DNA, 17 bp, synthetic construct
  source 1..17: mol_type = other DNA
gccatcatactagacta

SEQ ID NO: 4460 - DNA, 17 bp, synthetic construct
  source 1..17: mol_type = other DNA
tgccatcatactagact

SEQ ID NO: 4461 - DNA, 17 bp, synthetic construct
  source 1..17: mol_type = other DNA
ttgccatcatactagac

SEQ ID NO: 4462 - DNA, 17 bp, synthetic construct
  source 1..17: mol_type = other DNA
gttgccatcatactaga

SEQ ID NO: 4463 - DNA, 17 bp, synthetic construct
  source 1..17: mol_type = other DNA
atgttgccatcatacta

SEQ ID NO: 4464 - DNA, 17 bp, synthetic construct
  source 1..17: mol_type = other DNA
aatgttgccatcatact

SEQ ID NO: 4465 - DNA, 17 bp, synthetic construct
  source 1..17: mol_type = other DNA
caatgttgccatcatac

SEQ ID NO: 4466 - DNA, 17 bp, synthetic construct
  source 1..17: mol_type = other DNA
gcaatgttgccatcata

SEQ ID NO: 4467 - DNA, 17 bp, synthetic construct
  source 1..17: mol_type = other DNA
tgcaatgttgccatcat

SEQ ID NO: 4468 - DNA, 17 bp, synthetic construct
  source 1..17: mol_type = other DNA
ttgcaatgttgccatca

SEQ ID NO: 4469 - DNA, 17 bp, synthetic construct
  source 1..17: mol_type = other DNA
gttgcaatgttgccatc

SEQ ID NO: 4470 - DNA, 17 bp, synthetic construct
  source 1..17: mol_type = other DNA
ggttgcaatgttgccat

SEQ ID NO: 4471 - DNA, 17 bp, synthetic construct
  source 1..17: mol_type = other DNA
tggttgcaatgttgcca

SEQ ID NO: 4472 - DNA, 17 bp, synthetic construct
  source 1..17: mol_type = other DNA
gtggttgcaatgttgcc

SEQ ID NO: 4473 - DNA, 17 bp, synthetic construct
  source 1..17: mol_type = other DNA
ggtggttgcaatgttgc

SEQ ID NO: 4474 - DNA, 17 bp, synthetic construct
  source 1..17: mol_type = other DNA
ctggatggtggttgcaa

SEQ ID NO: 4475 - DNA, 17 bp, synthetic construct
  source 1..17: mol_type = other DNA
cctggatggtggttgca

SEQ ID NO: 4476 - DNA, 17 bp, synthetic construct
  source 1..17: mol_type = other DNA
gcctggatggtggttgc

SEQ ID NO: 4477 - DNA, 17 bp, synthetic construct
  source 1..17: mol_type = other DNA
agcctggatggtggttg

SEQ ID NO: 4478 - DNA, 17 bp, synthetic construct
  source 1..17: mol_type = other DNA
gagatctccagcagcaa

SEQ ID NO: 4479 - DNA, 17 bp, synthetic construct
  source 1..17: mol_type = other DNA
tgagatctccagcagca

SEQ ID NO: 4480 - DNA, 17 bp, synthetic construct
  source 1..17: mol_type = other DNA
ctgagatctccagcagc

SEQ ID NO: 4481 - DNA, 17 bp, synthetic construct
  source 1..17: mol_type = other DNA
actgagatctccagcag

SEQ ID NO: 4482 - DNA, 17 bp, synthetic construct
  source 1..17: mol_type = other DNA
ggagtgacagggcagga

SEQ ID NO: 4483 - DNA, 17 bp, synthetic construct
  source 1..17: mol_type = other DNA
tggagtgacagggcagg

SEQ ID NO: 4484 - DNA, 17 bp, synthetic construct
  source 1..17: mol_type = other DNA
atggagtgacagggcag

SEQ ID NO: 4485 - DNA, 17 bp, synthetic construct
  source 1..17: mol_type = other DNA
aagtctatcaggatgca

SEQ ID NO: 4486 - DNA, 17 bp, synthetic construct
  source 1..17: mol_type = other DNA
aaagtctatcaggatgc

SEQ ID NO: 4487 - DNA, 17 bp, synthetic construct
  source 1..17: mol_type = other DNA
caaagtctatcaggatg

SEQ ID NO: 4488 - DNA, 17 bp, synthetic construct
  source 1..17: mol_type = other DNA
acaaagtctatcaggat

SEQ ID NO: 4489 - DNA, 17 bp, synthetic construct
  source 1..17: mol_type = other DNA
tgacaaagtctatcagg

SEQ ID NO: 4490 - DNA, 17 bp, synthetic construct
  source 1..17: mol_type = other DNA
gtgacaaagtctatcag

SEQ ID NO: 4491 - DNA, 17 bp, synthetic construct
  source 1..17: mol_type = other DNA
agtgacaaagtctatca

SEQ ID NO: 4492 - DNA, 17 bp, synthetic construct
  source 1..17: mol_type = other DNA
cctagtgccccagggag

SEQ ID NO: 4493 - DNA, 17 bp, synthetic construct
  source 1..17: mol_type = other DNA
tcctagtgccccaggga

SEQ ID NO: 4494 - DNA, 17 bp, synthetic construct
  source 1..17: mol_type = other DNA
gtcctagtgccccaggg

SEQ ID NO: 4495 - DNA, 17 bp, synthetic construct
  source 1..17: mol_type = other DNA
tgtcctagtgccccagg

SEQ ID NO: 4496 - DNA, 17 bp, synthetic construct
  source 1..17: mol_type = other DNA
ggtattctgctcataaa

SEQ ID NO: 4497 - DNA, 17 bp, synthetic construct
  source 1..17: mol_type = other DNA
gggtattctgctcataa

SEQ ID NO: 4498 - DNA, 17 bp, synthetic construct
  source 1..17: mol_type = other DNA
agggtattctgctcata

SEQ ID NO: 4499 - DNA, 17 bp, synthetic construct
  source 1..17: mol_type = other DNA
aagggtattctgctcat

SEQ ID NO: 4500 - DNA, 17 bp, synthetic construct
  source 1..17: mol_type = other DNA
taagggtattctgctca

SEQ ID NO: 4501 - DNA, 17 bp, synthetic construct
  source 1..17: mol_type = other DNA
gtaagggtattctgctc

SEQ ID NO: 4502 - DNA, 17 bp, synthetic construct
  source 1..17: mol_type = other DNA
agtaagggtattctgct

SEQ ID NO: 4503 - DNA, 17 bp, synthetic construct
  source 1..17: mol_type = other DNA
gagacaatgagtaaggg

SEQ ID NO: 4504 - DNA, 17 bp, synthetic construct
  source 1..17: mol_type = other DNA
agagacaatgagtaagg

SEQ ID NO: 4505 - DNA, 17 bp, synthetic construct
  source 1..17: mol_type = other DNA
gagagacaatgagtaag

SEQ ID NO: 4506 - DNA, 17 bp, synthetic construct
  source 1..17: mol_type = other DNA
aagcgacagccctgtgc

SEQ ID NO: 4507 - DNA, 17 bp, synthetic construct
  source 1..17: mol_type = other DNA
caagcgacagccctgtg

SEQ ID NO: 4508 - DNA, 17 bp, synthetic construct
  source 1..17: mol_type = other DNA
acaagcgacagccctgt

SEQ ID NO: 4509 - DNA, 17 bp, synthetic construct
  source 1..17: mol_type = other DNA
aatgagacaggcagccc

SEQ ID NO: 4510 - DNA, 17 bp, synthetic construct
  source 1..17: mol_type = other DNA
gaatgagacaggcagcc

SEQ ID NO: 4511 - DNA, 17 bp, synthetic construct
  source 1..17: mol_type = other DNA
agaatgagacaggcagc

SEQ ID NO: 4512 - DNA, 17 bp, synthetic construct
  source 1..17: mol_type = other DNA
ctctgtgggctcctcca

SEQ ID NO: 4513 - DNA, 17 bp, synthetic construct
  source 1..17: mol_type = other DNA
gctctgtgggctcctcc

SEQ ID NO: 4514 - DNA, 17 bp, synthetic construct
  source 1..17: mol_type = other DNA
tgctctgtgggctcctc

SEQ ID NO: 4515 - DNA, 17 bp, synthetic construct
  source 1..17: mol_type = other DNA
gtgctctgtgggctcct

SEQ ID NO: 4516 - DNA, 17 bp, synthetic construct
  source 1..17: mol_type = other DNA
tgtgctctgtgggctcc

SEQ ID NO: 4517 - DNA, 17 bp, synthetic construct
  source 1..17: mol_type = other DNA
ccctgtgctctgtgggc

SEQ ID NO: 4518 - DNA, 17 bp, synthetic construct
  source 1..17: mol_type = other DNA
gccctgtgctctgtggg

SEQ ID NO: 4519 - DNA, 17 bp, synthetic construct
  source 1..17: mol_type = other DNA
ggccctgtgctctgtgg

SEQ ID NO: 4520 - DNA, 17 bp, synthetic construct
  source 1..17: mol_type = other DNA
ccactgtcagtctctcc

SEQ ID NO: 4521 - DNA, 17 bp, synthetic construct
  source 1..17: mol_type = other DNA
cccactgtcagtctctc

SEQ ID NO: 4522 - DNA, 17 bp, synthetic construct
  source 1..17: mol_type = other DNA
ccccactgtcagtctct

SEQ ID NO: 4523 - DNA, 17 bp, synthetic construct
  source 1..17: mol_type = other DNA
cttggctgcaagctctg

SEQ ID NO: 4524 - DNA, 17 bp, synthetic construct
  source 1..17: mol_type = other DNA
ccttggctgcaagctct

SEQ ID NO: 4525 - DNA, 17 bp, synthetic construct
  source 1..17: mol_type = other DNA
gccttggctgcaagctc

SEQ ID NO: 4526 - DNA, 20 bp, synthetic construct
  source 1..20: mol_type = other DNA
gcattcttgccaggcatgga

SEQ ID NO: 4527 - DNA, 20 bp, synthetic construct
  source 1..20: mol_type = other DNA
ctgcattcttgccaggcatg

SEQ ID NO: 4528 - DNA, 20 bp, synthetic construct
  source 1..20: mol_type = other DNA
actgcattcttgccaggcat

SEQ ID NO: 4529 - DNA, 20 bp, synthetic construct
  source 1..20: mol_type = other DNA
tgactgcattcttgccaggc

SEQ ID NO: 4530 - DNA, 20 bp, synthetic construct
  source 1..20: mol_type = other DNA
gtgactgcattcttgccagg

SEQ ID NO: 4531 - DNA, 20 bp, synthetic construct
  source 1..20: mol_type = other DNA
gggtgactgcattcttgcca

SEQ ID NO: 4532 - DNA, 20 bp, synthetic construct
  source 1..20: mol_type = other DNA
agggtgactgcattcttgcc

SEQ ID NO: 4533 - DNA, 20 bp, synthetic construct
  source 1..20: mol_type = other DNA
cagggtgactgcattcttgc

SEQ ID NO: 4534 - DNA, 20 bp, synthetic construct
  source 1..20: mol_type = other DNA
cgcagggtgactgcattctt

SEQ ID NO: 4535 - DNA, 20 bp, synthetic construct
  source 1..20: mol_type = other DNA
ccgcagggtgactgcattct

SEQ ID NO: 4536 - DNA, 20 bp, synthetic construct
  source 1..20: mol_type = other DNA
ttccgcagggtgactgcatt

SEQ ID NO: 4537 - DNA, 20 bp, synthetic construct
  source 1..20: mol_type = other DNA
gttccgcagggtgactgcat

SEQ ID NO: 4538 - DNA, 20 bp, synthetic construct
  source 1..20: mol_type = other DNA
ggttccgcagggtgactgca

SEQ ID NO: 4539 - DNA, 20 bp, synthetic construct
  source 1..20: mol_type = other DNA
gcggttccgcagggtgactg

SEQ ID NO: 4540 - DNA, 20 bp, synthetic construct
  source 1..20: mol_type = other DNA
tgcggttccgcagggtgact

SEQ ID NO: 4541 - DNA, 20 bp, synthetic construct
  source 1..20: mol_type = other DNA
cttgcggttccgcagggtga

SEQ ID NO: 4542 - DNA, 20 bp, synthetic construct
  source 1..20: mol_type = other DNA
ccttgcggttccgcagggtg

SEQ ID NO: 4543 - DNA, 20 bp, synthetic construct
  source 1..20: mol_type = other DNA
gcccttgcggttccgcaggg

SEQ ID NO: 4544 - DNA, 20 bp, synthetic construct
  source 1..20: mol_type = other DNA
agcccttgcggttccgcagg

SEQ ID NO: 4545 - DNA, 20 bp, synthetic construct
  source 1..20: mol_type = other DNA
aaagcccttgcggttccgca

SEQ ID NO: 4546 - DNA, 20 bp, synthetic construct
  source 1..20: mol_type = other DNA
caaagcccttgcggttccgc

SEQ ID NO: 4547 - DNA, 20 bp, synthetic construct
  source 1..20: mol_type = other DNA
cacaaagcccttgcggttcc

SEQ ID NO: 4548 - DNA, 20 bp, synthetic construct
  source 1..20: mol_type = other DNA
tcacaaagcccttgcggttc

SEQ ID NO: 4549 - DNA, 20 bp, synthetic construct
  source 1..20: mol_type = other DNA
tttcacaaagcccttgcggt

SEQ ID NO: 4550 - DNA, 20 bp, synthetic construct
  source 1..20: mol_type = other DNA
gtttcacaaagcccttgcgg

SEQ ID NO: 4551 - DNA, 20 bp, synthetic construct
  source 1..20: mol_type = other DNA
cagtttcacaaagcccttgc

SEQ ID NO: 4552 - DNA, 20 bp, synthetic construct
  source 1..20: mol_type = other DNA
ccagtttcacaaagcccttg

SEQ ID NO: 4553 - DNA, 20 bp, synthetic construct
  source 1..20: mol_type = other DNA
ggccagtttcacaaagccct

SEQ ID NO: 4554 - DNA, 20 bp, synthetic construct
  source 1..20: mol_type = other DNA
gggccagtttcacaaagccc

SEQ ID NO: 4555 - DNA, 20 bp, synthetic construct
  source 1..20: mol_type = other DNA
cagggccagtttcacaaagc

SEQ ID NO: 4556 - DNA, 20 bp, synthetic construct
  source 1..20: mol_type = other DNA
gcagggccagtttcacaaag

SEQ ID NO: 4557 - DNA, 20 bp, synthetic construct
  source 1..20: mol_type = other DNA
ttcattctctccaaaggagt

SEQ ID NO: 4558 - DNA, 20 bp, synthetic construct
  source 1..20: mol_type = other DNA
cttcattctctccaaaggag

SEQ ID NO: 4559 - DNA, 20 bp, synthetic construct
  source 1..20: mol_type = other DNA
cacttcattctctccaaagg

SEQ ID NO: 4560 - DNA, 20 bp, synthetic construct
  source 1..20: mol_type = other DNA
acacttcattctctccaaag

SEQ ID NO: 4561 - DNA, 20 bp, synthetic construct
  source 1..20: mol_type = other DNA
tacacttcattctctccaaa

SEQ ID NO: 4562 - DNA, 20 bp, synthetic construct
  source 1..20: mol_type = other DNA
tgtacacttcattctctcca

SEQ ID NO: 4563 - DNA, 20 bp, synthetic construct
  source 1..20: mol_type = other DNA
ttgtacacttcattctctcc

SEQ ID NO: 4564 - DNA, 20 bp, synthetic construct
  source 1..20: mol_type = other DNA
gcttgtacacttcattctct

SEQ ID NO: 4565 - DNA, 20 bp, synthetic construct
  source 1..20: mol_type = other DNA
tgcttgtacacttcattctc

SEQ ID NO: 4566 - DNA, 20 bp, synthetic construct
  source 1..20: mol_type = other DNA
cctgcttgtacacttcattc

SEQ ID NO: 4567 - DNA, 20 bp, synthetic construct
  source 1..20: mol_type = other DNA
acctgcttgtacacttcatt

SEQ ID NO: 4568 - DNA, 20 bp, synthetic construct
  source 1..20: mol_type = other DNA
cacctgcttgtacacttcat

SEQ ID NO: 4569 - DNA, 20 bp, synthetic construct
  source 1..20: mol_type = other DNA
atcacctgcttgtacacttc

SEQ ID NO: 4570 - DNA, 20 bp, synthetic construct
  source 1..20: mol_type = other DNA
gatcacctgcttgtacactt

SEQ ID NO: 4571 - DNA, 20 bp, synthetic construct
  source 1..20: mol_type = other DNA
aagatcacctgcttgtacac

SEQ ID NO: 4572 - DNA, 20 bp, synthetic construct
  source 1..20: mol_type = other DNA
gaagatcacctgcttgtaca

SEQ ID NO: 4573 - DNA, 20 bp, synthetic construct
  source 1..20: mol_type = other DNA
tcgaagatcacctgcttgta

SEQ ID NO: 4574 - DNA, 20 bp, synthetic construct
  source 1..20: mol_type = other DNA
ctcgaagatcacctgcttgt

SEQ ID NO: 4575 - DNA, 20 bp, synthetic construct
  source 1..20: mol_type = other DNA
tcctcgaagatcacctgctt

SEQ ID NO: 4576 - DNA, 20 bp, synthetic construct
  source 1..20: mol_type = other DNA
ctcctcgaagatcacctgct

SEQ ID NO: 4577 - DNA, 20 bp, synthetic construct
  source 1..20: mol_type = other DNA
ccctcctcgaagatcacctg

SEQ ID NO: 4578 - DNA, 20 bp, synthetic construct
  source 1..20: mol_type = other DNA
gccctcctcgaagatcacct

SEQ ID NO: 4579 - DNA, 20 bp, synthetic construct
  source 1..20: mol_type = other DNA
gagccctcctcgaagatcac

SEQ ID NO: 4580 - DNA, 20 bp, synthetic construct
  source 1..20: mol_type = other DNA
ggagccctcctcgaagatca

SEQ ID NO: 4581 - DNA, 20 bp, synthetic construct
  source 1..20: mol_type = other DNA
caggagccctcctcgaagat

SEQ ID NO: 4582 - DNA, 20 bp, synthetic construct
  source 1..20: mol_type = other DNA
ccaggagccctcctcgaaga

SEQ ID NO: 4583 - DNA, 20 bp, synthetic construct
  source 1..20: mol_type = other DNA
ccccaggagccctcctcgaa

SEQ ID NO: 4584 - DNA, 20 bp, synthetic construct
  source 1..20: mol_type = other DNA
gccccaggagccctcctcga

SEQ ID NO: 4585 - DNA, 20 bp, synthetic construct
  source 1..20: mol_type = other DNA
cggccccaggagccctcctc

SEQ ID NO: 4586 - DNA, 20 bp, synthetic construct
  source 1..20: mol_type = other DNA
tcggccccaggagccctcct

SEQ ID NO: 4587 - DNA, 20 bp, synthetic construct
  source 1..20: mol_type = other DNA
atcggccccaggagccctcc

SEQ ID NO: 4588 - DNA, 20 bp, synthetic construct
  source 1..20: mol_type = other DNA
ccatcggccccaggagccct

SEQ ID NO: 4589 - DNA, 20 bp, synthetic construct
  source 1..20: mol_type = other DNA
cccatcggccccaggagccc

SEQ ID NO: 4590 - DNA, 20 bp, synthetic construct
  source 1..20: mol_type = other DNA
gacccatcggccccaggagc

SEQ ID NO: 4591 - DNA, 20 bp, synthetic construct
  source 1..20: mol_type = other DNA
ggacccatcggccccaggag

SEQ ID NO: 4592 - DNA, 20 bp, synthetic construct
  source 1..20: mol_type = other DNA
gtatttctggaacttcttct

SEQ ID NO: 4593 - DNA, 20 bp, synthetic construct
  source 1..20: mol_type = other DNA
tgtatttctggaacttcttc

SEQ ID NO: 4594 - DNA, 20 bp, synthetic construct
  source 1..20: mol_type = other DNA
aatgtatttctggaacttct

SEQ ID NO: 4595 - DNA, 20 bp, synthetic construct
  source 1..20: mol_type = other DNA
caatgtatttctggaacttc

SEQ ID NO: 4596 - DNA, 20 bp, synthetic construct
  source 1..20: mol_type = other DNA
accaatgtatttctggaact

SEQ ID NO: 4597 - DNA, 20 bp, synthetic construct
  source 1..20: mol_type = other DNA
aaccaatgtatttctggaac

SEQ ID NO: 4598 - DNA, 20 bp, synthetic construct
  source 1..20: mol_type = other DNA
aaaccaatgtatttctggaa

SEQ ID NO: 4599 - DNA, 20 bp, synthetic construct
  source 1..20: mol_type = other DNA
gaaaccaatgtatttctgga

SEQ ID NO: 4600 - DNA, 20 bp, synthetic construct
  source 1..20: mol_type = other DNA
gcgaaaccaatgtatttctg

SEQ ID NO: 4601 - DNA, 20 bp, synthetic construct
  source 1..20: mol_type = other DNA
ggcgaaaccaatgtatttct

SEQ ID NO: 4602 - DNA, 20 bp, synthetic construct
  source 1..20: mol_type = other DNA
gtcggaggagaagaggcctc

SEQ ID NO: 4603 - DNA, 20 bp, synthetic construct
  source 1..20: mol_type = other DNA
ttcttaaaaaagacctaaca

SEQ ID NO: 4604 - DNA, 20 bp, synthetic construct
  source 1..20: mol_type = other DNA
ccttcttaaaaaagacctaa

SEQ ID NO: 4605 - DNA, 20 bp, synthetic construct
  source 1..20: mol_type = other DNA
tccttcttaaaaaagaccta

SEQ ID NO: 4606 - DNA, 20 bp, synthetic construct
  source 1..20: mol_type = other DNA
ttccttcttaaaaaagacct

SEQ ID NO: 4607 - DNA, 20 bp, synthetic construct
  source 1..20: mol_type = other DNA
ttttccttcttaaaaaagac

SEQ ID NO: 4608 - DNA, 20 bp, synthetic construct
  source 1..20: mol_type = other DNA
tttttccttcttaaaaaaga

SEQ ID NO: 4609 - DNA, 20 bp, synthetic construct
  source 1..20: mol_type = other DNA
ctttttccttcttaaaaaag

SEQ ID NO: 4610 - DNA, 20 bp, synthetic construct
  source 1..20: mol_type = other DNA
gactttttccttcttaaaaa

SEQ ID NO: 4611 - DNA, 20 bp, synthetic construct
  source 1..20: mol_type = other DNA
tgactttttccttcttaaaa

SEQ ID NO: 4612 - DNA, 20 bp, synthetic construct
  source 1..20: mol_type = other DNA
ctgactttttccttcttaaa

SEQ ID NO: 4613 - DNA, 20 bp, synthetic construct
  source 1..20: mol_type = other DNA
actgactttttccttcttaa

SEQ ID NO: 4614 - DNA, 20 bp, synthetic construct
  source 1..20: mol_type = other DNA
caccacctagaacagggcaa

SEQ ID NO: 4615 - DNA, 20 bp, synthetic construct
  source 1..20: mol_type = other DNA
gccaccacctagaacagggc

SEQ ID NO: 4616 - DNA, 20 bp, synthetic construct
  source 1..20: mol_type = other DNA
agccaccacctagaacaggg

SEQ ID NO: 4617 - DNA, 20 bp, synthetic construct
  source 1..20: mol_type = other DNA
tagccaccacctagaacagg

SEQ ID NO: 4618 - DNA, 20 bp, synthetic construct
  source 1..20: mol_type = other DNA
tttagccaccacctagaaca

SEQ ID NO: 4619 - DNA, 20 bp, synthetic construct
  source 1..20: mol_type = other DNA
atttagccaccacctagaac

SEQ ID NO: 4620 - DNA, 20 bp, synthetic construct
  source 1..20: mol_type = other DNA
gatttagccaccacctagaa

SEQ ID NO: 4621 - DNA, 20 bp, synthetic construct
  source 1..20: mol_type = other DNA
agatttagccaccacctaga

SEQ ID NO: 4622 - DNA, 20 bp, synthetic construct
  source 1..20: mol_type = other DNA
ccagatttagccaccaccta

SEQ ID NO: 4623 - DNA, 20 bp, synthetic construct
  source 1..20: mol_type = other DNA
cccagatttagccaccacct

SEQ ID NO: 4624 - DNA, 20 bp, synthetic construct
  source 1..20: mol_type = other DNA
gcccagatttagccaccacc

SEQ ID NO: 4625 - DNA, 20 bp, synthetic construct
  source 1..20: mol_type = other DNA
ggcccagatttagccaccac

SEQ ID NO: 4626 - DNA, 20 bp, synthetic construct
  source 1..20: mol_type = other DNA
taggcccagatttagccacc

SEQ ID NO: 4627 - DNA, 20 bp, synthetic construct
  source 1..20: mol_type = other DNA
ttaggcccagatttagccac

SEQ ID NO: 4628 - DNA, 20 bp, synthetic construct
  source 1..20: mol_type = other DNA
attaggcccagatttagcca

SEQ ID NO: 4629 - DNA, 20 bp, synthetic construct
  source 1..20: mol_type = other DNA
gattaggcccagatttagcc

SEQ ID NO: 4630 - DNA, 20 bp, synthetic construct
  source 1..20: mol_type = other DNA
cagattaggcccagatttag

SEQ ID NO: 4631 - DNA, 20 bp, synthetic construct
  source 1..20: mol_type = other DNA
ccagattaggcccagattta

SEQ ID NO: 4632 - DNA, 20 bp, synthetic construct
  source 1..20: mol_type = other DNA
cccagattaggcccagattt

SEQ ID NO: 4633 - DNA, 20 bp, synthetic construct
  source 1..20: mol_type = other DNA
acccagattaggcccagatt

SEQ ID NO: 4634 - DNA, 20 bp, synthetic construct
  source 1..20: mol_type = other DNA
ccacccagattaggcccaga

SEQ ID NO: 4635 - DNA, 20 bp, synthetic construct
  source 1..20: mol_type = other DNA
gccacccagattaggcccag

SEQ ID NO: 4636 - DNA, 20 bp, synthetic construct
  source 1..20: mol_type = other DNA
agccacccagattaggccca

SEQ ID NO: 4637 - DNA, 20 bp, synthetic construct
  source 1..20: mol_type = other DNA
gagccacccagattaggccc

SEQ ID NO: 4638 - DNA, 20 bp, synthetic construct
  source 1..20: mol_type = other DNA
ctgagccacccagattaggc

SEQ ID NO: 4639 - DNA, 20 bp, synthetic construct
  source 1..20: mol_type = other DNA
gctgagccacccagattagg

SEQ ID NO: 4640 - DNA, 20 bp, synthetic construct
  source 1..20: mol_type = other DNA
agctgagccacccagattag

SEQ ID NO: 4641 - DNA, 20 bp, synthetic construct
  source 1..20: mol_type = other DNA
tagctgagccacccagatta

SEQ ID NO: 4642 - DNA, 20 bp, synthetic construct
  source 1..20: mol_type = other DNA
gttagctgagccacccagat

SEQ ID NO: 4643 - DNA, 20 bp, synthetic construct
  source 1..20: mol_type = other DNA
ggttagctgagccacccaga

SEQ ID NO: 4644 - DNA, 20 bp, synthetic construct
  source 1..20: mol_type = other DNA
gaggttagctgagccaccca

SEQ ID NO: 4645 - DNA, 20 bp, synthetic construct
  source 1..20: mol_type = other DNA
agaggttagctgagccaccc

SEQ ID NO: 4646 - DNA, 20 bp, synthetic construct
  source 1..20: mol_type = other DNA
gtcacttcaggaagggaaga

SEQ ID NO: 4647 - DNA, 20 bp, synthetic construct
  source 1..20: mol_type = other DNA
tgtcacttcaggaagggaag

SEQ ID NO: 4648 - DNA, 20 bp, synthetic construct
  source 1..20: mol_type = other DNA
aaaagtgaatcatctaactg

SEQ ID NO: 4649 - DNA, 20 bp, synthetic construct
  source 1..20: mol_type = other DNA
aaaaagtgaatcatctaact

SEQ ID NO: 4650 - DNA, 20 bp, synthetic construct
  source 1..20: mol_type = other DNA
caaaaagtgaatcatctaac

SEQ ID NO: 4651 - DNA, 20 bp, synthetic construct
  source 1..20: mol_type = other DNA
gcaaaaagtgaatcatctaa

SEQ ID NO: 4652 - DNA, 20 bp, synthetic construct
  source 1..20: mol_type = other DNA
gggcaaaaagtgaatcatct

SEQ ID NO: 4653 - DNA, 20 bp, synthetic construct
  source 1..20: mol_type = other DNA
cttgtatgagaagtggcttt

SEQ ID NO: 4654 - DNA, 20 bp, synthetic construct
  source 1..20: mol_type = other DNA
gcttgtatgagaagtggctt

SEQ ID NO: 4655 - DNA, 20 bp, synthetic construct
  source 1..20: mol_type = other DNA
gggcttgtatgagaagtggc

SEQ ID NO: 4656 - DNA, 20 bp, synthetic construct
  source 1..20: mol_type = other DNA
cctgcagtttcaggactaga

SEQ ID NO: 4657 - DNA, 20 bp, synthetic construct
  source 1..20: mol_type = other DNA
tcctgcagtttcaggactag

SEQ ID NO: 4658 - DNA, 20 bp, synthetic construct
  source 1..20: mol_type = other DNA
ggtcctgcagtttcaggact

SEQ ID NO: 4659 - DNA, 20 bp, synthetic construct
  source 1..20: mol_type = other DNA
tggtcctgcagtttcaggac

SEQ ID NO: 4660 - DNA, 20 bp, synthetic construct
  source 1..20: mol_type = other DNA
ctggtcctgcagtttcagga

SEQ ID NO: 4661 - DNA, 20 bp, synthetic construct
  source 1..20: mol_type = other DNA
aactggtcctgcagtttcag

SEQ ID NO: 4662 - DNA, 20 bp, synthetic construct
  source 1..20: mol_type = other DNA
aaactggtcctgcagtttca

SEQ ID NO: 4663 - DNA, 20 bp, synthetic construct
  source 1..20: mol_type = other DNA
agaaactggtcctgcagttt

SEQ ID NO: 4664 - DNA, 20 bp, synthetic construct
  source 1..20: mol_type = other DNA
gagaaactggtcctgcagtt

SEQ ID NO: 4665 - DNA, 20 bp, synthetic construct
  source 1..20: mol_type = other DNA
agagaaactggtcctgcagt

SEQ ID NO: 4666 - DNA, 20 bp, synthetic construct
  source 1..20: mol_type = other DNA
cagagaaactggtcctgcag

SEQ ID NO: 4667 - DNA, 20 bp, synthetic construct
  source 1..20: mol_type = other DNA
ggcagagaaactggtcctgc

SEQ ID NO: 4668 - DNA, 20 bp, synthetic construct
  source 1..20: mol_type = other DNA
tggcagagaaactggtcctg

SEQ ID NO: 4669 - DNA, 20 bp, synthetic construct
  source 1..20: mol_type = other DNA
ttggcagagaaactggtcct

SEQ ID NO: 4670 - DNA, 20 bp, synthetic construct
  source 1..20: mol_type = other DNA
cttggcagagaaactggtcc

SEQ ID NO: 4671 - DNA, 20 bp, synthetic construct
  source 1..20: mol_type = other DNA
cccttggcagagaaactggt

SEQ ID NO: 4672 - DNA, 20 bp, synthetic construct
  source 1..20: mol_type = other DNA
ccccttggcagagaaactgg

SEQ ID NO: 4673 - DNA, 20 bp, synthetic construct
  source 1..20: mol_type = other DNA
ctccccttggcagagaaact

SEQ ID NO: 4674 - DNA, 20 bp, synthetic construct
  source 1..20: mol_type = other DNA
cctccccttggcagagaaac

SEQ ID NO: 4675 - DNA, 20 bp, synthetic construct
  source 1..20: mol_type = other DNA
tcctccccttggcagagaaa

SEQ ID NO: 4676 - DNA, 20 bp, synthetic construct
  source 1..20: mol_type = other DNA
actcctccccttggcagaga

SEQ ID NO: 4677 - DNA, 20 bp, synthetic construct
  source 1..20: mol_type = other DNA
aactcctccccttggcagag

SEQ ID NO: 4678 - DNA, 20 bp, synthetic construct
  source 1..20: mol_type = other DNA
caactcctccccttggcaga

SEQ ID NO: 4679 - DNA, 20 bp, synthetic construct
  source 1..20: mol_type = other DNA
tccaactcctccccttggca

SEQ ID NO: 4680 - DNA, 20 bp, synthetic construct
  source 1..20: mol_type = other DNA
  modified_base 1: mod_base = OTHER; note = 2'-O-methoxyethyl thymidine 3'-phosphorothioate
  modified_base 2: mod_base = OTHER; note = 2'-O-methoxyethyl guanosine 3'-phosphorothioate
  modified_base 3..4: mod_base = OTHER; note = 2'-O-methoxyethyl 5-methylcytidine 3'-phosphorothioate
  modified_base 5: mod_base = OTHER; note = 2'-O-methoxyethyl adenosine 3'-phosphorothioate
  modified_base 6..8: mod_base = OTHER; note = 2'-deoxythymidine 3'-phosphorothioate
  modified_base 9..10: mod_base = OTHER; note = 2'-deoxyadenosine 3'-phosphorothioate
  modified_base 11: mod_base = OTHER; note = 2'-deoxythymidine 3'-phosphorothioate
  modified_base 12: mod_base = OTHER; note = 2'-deoxyguanosine 3'-phosphorothioate
  modified_base 13: mod_base = OTHER; note = 2'-deoxyadenosine 3'-phosphorothioate
  modified_base 14: mod_base = OTHER; note = 2'-deoxyguanosine 3'-phosphorothioate
  modified_base 15: mod_base = OTHER; note = 5-methyl-2'-deoxycytidine 3'-phosphorothioate
  modified_base 16..17: mod_base = OTHER; note = 2'-O-methoxyethyl thymidine 3'-phosphorothioate
  modified_base 18: mod_base = OTHER; note = 2'-O-methoxyethyl 5-methylcytidine 3'-phosphorothioate
  modified_base 19: mod_base = OTHER; note = 2'-O-methoxyethyl adenosine 3'-phosphorothioate
  modified_base 20: mod_base = OTHER; note = 2'-O-methoxyethyl 5-methylcytidine
tgccatttaatgagcttcac

SEQ ID NO: 4681 - DNA, 20 bp, synthetic construct
  source 1..20: mol_type = other DNA
  misc_feature 1: note = conjugated at the 5' position to Trishexylamino-(N-Acetylgalactosamine)3-6-aminohexyl phosphodiester
  modified_base 1: mod_base = OTHER; note = 2'-O-methoxyethyl thymidine 3'-phosphorothioate
  modified_base 2: mod_base = OTHER; note = 2'-O-methoxyethyl guanosine 3'-phosphorothioate
  modified_base 3..4: mod_base = OTHER; note = 2'-O-methoxyethyl 5-methylcytidine 3'-phosphorothioate
  modified_base 5: mod_base = OTHER; note = 2'-O-methoxyethyl adenosine 3'-phosphorothioate
  modified_base 6..8: mod_base = OTHER; note = 2'-deoxythymidine 3'-phosphorothioate
  modified_base 9..10: mod_base = OTHER; note = 2'-deoxyadenosine 3'-phosphorothioate
  modified_base 11: mod_base = OTHER; note = 2'-deoxythymidine 3'-phosphorothioate
  modified_base 12: mod_base = OTHER; note = 2'-deoxyguanosine 3'-phosphorothioate
  modified_base 13: mod_base = OTHER; note = 2'-deoxyadenosine 3'-phosphorothioate
  modified_base 14: mod_base = OTHER; note = 2'-deoxyguanosine 3'-phosphorothioate
  modified_base 15: mod_base = OTHER; note = 5-methyl-2'-deoxycytidine 3'-phosphorothioate
  modified_base 16..17: mod_base = OTHER; note = 2'-O-methoxyethyl thymidine 3'-phosphorothioate
  modified_base 18: mod_base = OTHER; note = 2'-O-methoxyethyl 5-methylcytidine 3'-phosphorothioate
  modified_base 19: mod_base = OTHER; note = 2'-O-methoxyethyl adenosine 3'-phosphorothioate
  modified_base 20: mod_base = OTHER; note = 2'-O-methoxyethyl 5-methylcytidine
tgccatttaatgagcttcac

SEQ ID NO: 4682 - DNA, 20 bp, synthetic construct
  source 1..20: mol_type = other DNA
  misc_feature 1: note = conjugated at the 5' position to Trishexylamino-(N-Acetylgalactosamine)3-6-aminohexyl phosphodiester
  modified_base 1: mod_base = OTHER; note = 2'-O-methoxyethyl thymidine 3'-phosphorothioate
  modified_base 2: mod_base = OTHER; note = 2'-O-methoxyethyl guanosine 3'-phosphorothioate
  modified_base 3..4: mod_base = OTHER; note = 2'-O-methoxyethyl 5-methylcytidine 3'-phosphodiester
  modified_base 5: mod_base = OTHER; note = 2'-O-methoxyethyl adenosine 3'-phosphorothioate
  modified_base 6..8: mod_base = OTHER; note = 2'-deoxythymidine 3'-phosphorothioate
  modified_base 9..10: mod_base = OTHER; note = 2'-deoxyadenosine 3'-phosphorothioate
  modified_base 11: mod_base = OTHER; note = 2'-deoxythymidine 3'-phosphorothioate
  modified_base 12: mod_base = OTHER; note = 2'-deoxyguanosine 3'-phosphorothioate
  modified_base 13: mod_base = OTHER; note = 2'-deoxyadenosine 3'-phosphorothioate
  modified_base 14: mod_base = OTHER; note = 2'-deoxyguanosine 3'-phosphorothioate
  modified_base 15: mod_base = OTHER; note = 5-methyl-2'-deoxycytidine 3'-phosphorothioate
  modified_base 16..17: mod_base = OTHER; note = 2'-O-methoxyethyl thymidine 3'-phosphodiester
  modified_base 18: mod_base = OTHER; note = 2'-O-methoxyethyl 5-methylcytidine 3'-phosphorothioate
  modified_base 19: mod_base = OTHER; note = 2'-O-methoxyethyl adenosine 3'-phosphorothioate
  modified_base 20: mod_base = OTHER; note = 2'-O-methoxyethyl 5-methylcytidine
tgccatttaatgagcttcac

SEQ ID NO: 4683 - DNA, 20 bp, synthetic construct
  source 1..20: mol_type = other DNA
  misc_feature 1: note = conjugated at the 5' position to Trishexylamino-(N-Acetylgalactosamine)3-6-aminohexyl phosphodiester
  modified_base 1: mod_base = OTHER; note = 2'-O-methoxyethyl thymidine 3'-phosphorothioate
  modified_base 2: mod_base = OTHER; note = 2'-O-methoxyethyl guanosine 3'-phosphodiester
  modified_base 3..4: mod_base = OTHER; note = 2'-O-methoxyethyl 5-methylcytidine 3'-phosphodiester
  modified_base 5: mod_base = OTHER; note = 2'-O-methoxyethyl adenosine 3'-phosphodiester
  modified_base 6..8: mod_base = OTHER; note = 2'-deoxythymidine 3'-phosphorothioate
  modified_base 9..10: mod_base = OTHER; note = 2'-deoxyadenosine 3'-phosphorothioate
  modified_base 11: mod_base = OTHER; note = 2'-deoxythymidine 3'-phosphorothioate
  modified_base 12: mod_base = OTHER; note = 2'-deoxyguanosine 3'-phosphorothioate
  modified_base 13: mod_base = OTHER; note = 2'-deoxyadenosine 3'-phosphorothioate
  modified_base 14: mod_base = OTHER; note = 2'-deoxyguanosine 3'-phosphorothioate
  modified_base 15: mod_base = OTHER; note = 5-methyl-2'-deoxycytidine 3'-phosphorothioate
  modified_base 16..17: mod_base = OTHER; note = 2'-O-methoxyethyl thymidine 3'-phosphodiester
  modified_base 18: mod_base = OTHER; note = 2'-O-methoxyethyl 5-methylcytidine 3'-phosphorothioate
  modified_base 19: mod_base = OTHER; note = 2'-O-methoxyethyl adenosine 3'-phosphorothioate
  modified_base 20: mod_base = OTHER; note = 2'-O-methoxyethyl 5-methylcytidine
tgccatttaatgagcttcac
